(19) United States
(12) Patent Application Publication
(10) Pub. No.: US 2005/0202421 A1
(43) Pub. Date: Sep. 15, 2005

(54) Method for diagnosis and treatment of rheumatoid arthritis

(76) Inventors: Raphael Hirsch, Pittsburgh, PA (US); Sherry L. Thornton, Cincinnati, OH (US)

Correspondence Address: FROST BROWN TODD, LLC, 2200 PNC CENTER, 201 E. FIFTH STREET, CINCINNATI, OH, 45202, US

(21) Appl. No.: 10/287,436

(22) Filed: Oct. 31, 2002

Related U.S. Application Data
(60) Provisional application No. 60/336,220, filed on Oct. 31, 2001.

(51) Int. Cl. C12Q 1/68

(52) U.S. Cl. 435/6

(57) ABSTRACT

The onset and progression of chronic autoimmune diseases, including human rheumatoid arthritis (RA) are likely determined by differential expression of genes that influence inflammatory and immune responses. The collagen-induced arthritis (CIA) mouse model for RA exhibits many of the same genetic and immunological features of RA; however, the profiles of gene expression during the inflammatory and immune responses of CIA or RA have not been well characterized. Previous studies have demonstrated that mRNA levels, particularly that of cytokines, can change over the course of CIA. To determine the contribution of various genes in the pathogenesis of CIA, microarray technology was used to simultaneously monitor 8,734 target cDNAs to discover arthritic stage-specific genes. The resulting gene expression profile identified 333 genes that were at least 2-fold up-regulated in all synovial samples: normal, acute disease and chronic disease. In addition, 385 disease-specific genes were identified that were greater than or equal to 2-fold over- or under-expressed in the disease state as compared to normal synovium. Clustering analysis among the arthritic states allowed for the identification of four distinct kinetic expression patterns based on differential expression levels in normal, acute disease and chronic disease synovial samples.

### CROSS REFERENCE TO RELATED APPLICATIONS

[0001] This application claims the benefit of provisional application Ser. No. 60/336,220, filed Oct. 31, 2001, the disclosure of which is incorporated by reference herein in its entirety.

### GOVERNMENT INTEREST IN THE INVENTION

[0002] Certain aspects of the invention disclosed herein were made with United States government support under National Institutes of Health grants AI34958, AR44059, AR47712, and AR42632. The United States government has certain rights in these aspects of the invention.

### INCORPORATION-BY-REFERENCE OF CD-ROM DATA

[0003] Applicants hereby incorporate by reference in their entirety two copies of a compact disc, labeled “Copy 1” and “Copy 2,” respectively, containing table1.1.txt, 2,276,363 size in bytes, created on Oct. 31, 2002; table1.2.txt, 1,335,492 size in bytes, created on Oct. 31, 2002; table1.3.txt, 2,924,772 size in bytes, created on Oct. 31, 2002; table2.1.txt, 817,381 size in bytes, created on Oct. 31, 2002; table2.2.txt, 1,003,344 size in bytes, created on Oct. 31, 2002; and table2.3.txt, 604,772 size in bytes, created on Oct. 31, 2002.

### BACKGROUND OF THE INVENTION

[0004] 1. Field of the Invention

[0005] The invention relates generally to materials and methods for diagnosis and treatment of rheumatoid arthritis (RA) and related conditions. More specifically, the invention relates to nucleic acids, proteins, arrays thereof, methods for diagnosis and methods for analyzing the severity of RA and related conditions using, for example, patterns of up- and down-regulation of specific genes identified by microarray technology. The invention further relates to the treatment of RA by activating those genes or proteins that are down-regulated and/or inhibiting those genes or proteins that are up-regulated. The invention also relates to identifying and using targets for drug treatment, methods of screening candidate drugs, and methods for identifying optimal treatment approaches for a specific patient.

[0006] 2. DESCRIPTION OF THE RELATED ART

[0007] Collagen-induced arthritis (CIA) in mice has been utilized to study underlying mechanisms of autoimmune arthritis because of its clinical, histologic, immunologic and genetic similarity to rheumatoid arthritis (RA). Although several immunoregulatory genes have been implicated in this model system, molecular mechanisms underlying the pathophysiology have only been partially defined.

[0008] In CIA, progression of disease is associated with changes in the cell types infiltrating the joint. The acute phase of the disease is characterized by a predominantly neutrophilic infiltrate, with monocytes and lymphocytes constituting approximately 5% of the inflammatory cell population. By day 49, a decrease in lymphocytes is observed, with an increase in fibroblast/macrophage type cells and an increasingly fibrotic appearance. In conjunction with the changes of cellular infiltrate, mRNA and protein expression levels of several cytokines and chemokines also change over the course of disease. For example, TNFα protein expression in the joint precedes that of IL-1β and IFN-γ is expressed shortly after disease onset, but not late in disease. IL-1β and IL-10 mRNAs, but not those of IFN-γ and IL-5, are detected in late disease.

[0009] Classical approaches to studying inflammatory mediators in arthritis have focused on identifying and analyzing these mediators individually. While this method has proven extremely productive, arthritis represents a complex and multifactorial pathophysiology that likely involves hundreds or thousands of individual gene products acting in concert. Improved understanding of the genes that are operative during the development of the inflammatory lesion may aid in the design of disease-specific therapies. Several methods to examine coordinated gene expression have been developed, including Northern blot, ribonuclease protection assay (RPA), differential display and sequencing of cDNA libraries and expressed sequence tags (ESTs). Using total paw RNA from a mouse with CIA and using the method of RPA, the inventors have previously demonstrated distinct changes in mRNA expression of a number of cytokines in early and late CIA. IL-2, IL-6, MIP2 and IL-1β were found predominantly in early disease, whereas, TGFβ was found predominantly in late disease. IL-11, IL-1ra, MIP1α, RANTES, TNFα and TNFβ were present both in early and late disease. These changes in gene expression within the joint likely affect the disease pathology observed at the cellular and macroscopic level. Whether a similar temporal change in cellular infiltrate and mRNA expression profiles also occurs in RA is not clear, as few synovial biopsies have been performed at the very early stages of RA. However, since most of the previously mentioned cytokines are found in synovial fluids and chronic RA synovium, these findings have relevance to RA.

[0010] The recent advent of high-throughput methods, such as serial analysis of gene expression (SAGE) and DNA microarrays, have allowed large-scale, genome-wide characterizations of gene expression to be performed. Whole-genome expression profiling represents a major advance in genome-wide functional analysis. In a single assay, the transcriptional response of each gene to a change in cellular state, including a disease or a chemical perturbation, can be measured. These changes in gene expression can reflect changes in mRNA levels or changes in the cells (proliferation or infiltration) that synthesize these mRNAs. DNA microarray technology is well-suited for analyzing chronic diseases, such as autoimmune arthritis, because of the wide spectrum of genes and endogenous mediators involved. A recent report describing the analysis of RA and inflammatory bowel disease tissues used a microarray of about 100 genes known to have a role in inflammation. IL-6 and several matrix metalloproteinases were markedly upregulated in RA tissues; however the observed upregulation of matrix metallo-elastase (HME) was unexpected, since its expression was previously thought to be limited to alveolar macrophages and placental cells. Analyses such as these are able to identify genes, both known and novel, and discover their coordinately regulated expression during the disease process.

[0011] Analysis of global gene expression in disease joints is likely to lead to a fuller understanding of the inflammatory processes responsible for arthritis. In the present study, DNA microarray technology was used to identify novel genes and biological pathways involved in CIA and to test the hypothesis that the previously observed set of stage-specific differentially activated genes in CIA represents a larger transcriptional profile.

### SUMMARY OF THE INVENTION

[0012] Using microarray analysis, the expression of 8734 cDNAs was analyzed during various stages of mouse collagen induced arthritis (CIA), an animal model of RA. From the results, a method for the diagnosis and treatment of RA was developed.

[0013] Embodiments relate to methods for the diagnosis and analysis of autoimmune disease or arthritide, in a patient. The methods can include, for example, obtaining a patient sample containing mRNA; analyzing gene expression using the mRNA that results in a gene expression signature of that mRNA, wherein the gene expression signature includes the identification and quantitation of gene expression from genes that have been identified as being differentially expressed in RA; and using that gene expression signature to diagnose or analyze the autoimmune disease or arthritide in said patient, wherein said gene expression of at least about 60% of said genes correlates with that of said gene signature.

[0014] The autoimmune disease or arthritides can be, for example, Rheumatoid Arthritis, Lupus, Ankylosing Spondylitis, fibrositis, fibromyalgia, osteoarthritis, Gout, Juvenile Rheumatoid Arthritis, an autoimmune disease caused by an infectious agent, and the like. Preferably, the autoimmune disease or arthritide can be rheumatoid arthritis. The patient can be, for example, a human, a primate, a dog, a cat, a horse, a sheep, and the like.

[0015] The analysis can be, for example, an analysis of severity of the disease, an analysis of pain manifestation, an analysis of deformity, an analysis of treatment methods, an analysis of treatment efficacy, and the like.

[0016] The gene expression analysis can involve at least about 10 genes that are identified as differentially expressed in arthritis, preferably at least about 50 genes that are identified as differentially expressed in arthritis, more preferably at least about 100 genes that are identified as differentially expressed in arthritis, and the like.

[0017] The genes identified can be expressed at least about 1.5 fold higher or lower than normal, at least about 2 fold higher or lower than normal, at least about 3 fold higher or lower than normal, and the like.

[0018] The genes can include, for example, the 385 genes or ESTs in Table 1 (SEQ ID NOS:1-385), homologs, variant thereof, and the like. The genes can include the genes in cluster A, and in embodiments the genes in cluster A can be down-regulated (SEQ ID NOS:1-37) at least about 2 fold, for example. Further, the genes can include the genes in cluster B, and in embodiments the genes in cluster B can be up-regulated (SEQ ID NOS:1-37) at least about 2 fold only in late or severe disease, for example. The genes can include the genes in cluster C, and in embodiments the genes in cluster C can be up-regulated (SEQ ID NOS:1-37) at least about 2 fold only in early or mild disease, for example. Also, the genes can include the genes in cluster D, and in embodiments the genes in cluster D can be up-regulated (SEQ ID NOS:1-37) at least about 2 fold in early or mild disease and more in late or severe disease, for example. Furthermore, genes can include the genes in cluster E, and in embodiments the genes in cluster E can be up-regulated (SEQ ID NOS:1-37) at least about 2 fold in both early or mile and late or severe disease, for example.

[0019] Also, the differentially expressed genes can include the 385 genes identified as SEQ ID NOS:1-385, for example. If the genes in clusters B or D are upregulated, the disease can be diagnosed as severe. Furthermore, if the genes in cluster A are upregulated, the disease can be diagnosed as moderate to low-grade.

[0020] Further, the gene expression of at least about 70% of the genes correlates with that of the gene signature, preferably, the gene expression of at least about 80% of the genes correlates with that of the gene signature, more preferably, the gene expression of at least about 90% of the genes correlates with that of the gene signature, still more preferably, the gene expression of at least about 95% of the genes correlates with that of the gene signature, and the like.

[0021] Aspects and embodiments of the invention further provide methods for the treatment of RA that include down-regulating at least one of the genes identified in clusters B through D. Such down-regulation can be achieved by adding antisense oligonucleotides specific for the gene that is being down-regulated, or by adding or expressing a repressor of the gene that is being down-regulated.

[0022] In other embodiments, the invention provides methods for the treatment of RA which involve up-regulating at least one of the genes in cluster A, for example, by adding or expressing a transcriptional activator of the gene that is being up-regulated, or by adding a vector that expresses the protein encoded by the gene that is being up-regulated.

[0023] Further aspects and embodimetns of the invention provide methods for the identification of genes for targeting in the treatment of rheumatoid arthritis in a mammal other than a mouse, which methods involve identifying homologs of SEQ ID NOS:1-385.

[0024] Still other aspects and embodimetns of the invention include methods for the diagnosis of rheumatoid arthritis in a mammal, the methods including obtaining a tissue or fluid sample from a diseased patient; isolating mRNA from said sample; using the isolated mRNA to analyze the gene expression of at least about 40 genes, selected from the group consisting of SEQ ID NOS:1-385 or a homolog thereof, obtaining a fingerprint of the patient's gene expression; and identifying whether at least about 60% of said fingerprint is at least about 2 fold differentially expressed from that of a normal patient.

[0025] Other embodiments include an array or a genechip, specific for rheumatoid arthritis, including at least 10 of the genes selected from the group consisting of SEQ ID NOS:1-385 or homologs thereof. The array or genechip can include at least 40, 50, 75, 100, or more, of the genes selected from the group consisting of SEQ ID NOS:1-385 or homologs thereof. In some embodiments, the array or genechip consists essentially of such genes, including up to all of the genes of SEQ ID NOS:1-385 or homologs thereof. Such genes can allow for the identification of the severity of the disease, the prognosis of the disease, the diagnosis of the disease, the most efficacious treatment of the disease in a specific patient, and the like.

[0026] In other embodiments, the invention provides methods for the diagnosis or analyses of autoimmune disease or rheumatoid arthritis, including: obtaining mRNA from a patient; using the mRNA as a probe for the analysis of the arrays or genechips disclosed herein; and comparing the results obtained with those of a normal patient.

[0027] Additional embodiments and aspects provide methods of screening the efficacy of a candidate drug in vitro for the treatment of collagen-induced arthritis including: identifying vascular endothelial cells expressing FARP mRNA and protein; introducing a candidate drug to said endothelial cells; and evaluating whether said candidate drug causes enhanced or normalized apoptosis of vascular endothelial cells.

[0028] Further, the invention in some embodiments provides methods and materials for reducing the symptoms associated with collagen-induced arthritis including: identifying a subject suffering from collagen-induced arthritis; and administering a compound effective to deplete at least one of the group of FARP mRNA, FARP protein, FARP receptor binding, and FARP activity. Such compound can include, for example, an anti-FARP antibody, capable of interfering with binding of FARP to a FARP receptor.

### BRIEF DESCRIPTION OF THE DRAWINGS

[0029] FIG. 1. Hierarchical cluster analysis of 385 genes differentially expressed during CIA. The left panel shows the distribution of gene expression across the hierarchical tree structure in which the values for the first normal sample (1) are set to 1. Rows represent individual genes; columns represent individual values of duplicate samples for each experimental time point. Each cell in the matrix represents the expression level of a single transcript with red and green indicating transcript levels above and below the normal values for that gene across all samples, respectively. The color code for the signal strength in the classification scheme is shown in the box at the bottom left of the panel. Color intensity from pale to deep indicates trust values for the expression of each specific transcript. The colored side bar indicates the five basic clusters of gene expression, with letters corresponding to their grouping. The mean values of all the genes within the indicated groups (A-E) are graphed on the right.

[0030] FIG. 2. Comparison of microarray and RT-PCR analyses of representative genes in CIA. The patterns of IL-2Rγ and follistatin-like gene mRNA levels, determined by DNA microarray analysis from pooled RNA, are compared to patterns determined by real time RT-PCR analysis of two individual RNA samples.

[0031] FIG. 3. IL2-Rγ is expressed in the synovial tissue during collagen-induced arthritis. Panel A (dark-field illumination) and panel B (bright-field illumination) show a section through the joint from a normal mouse paw. There is no signal in the joint tissue or surrounding periosteal tissue. Panels C and D show a section through a CIA mouse paw 28 days following primary CII immunization. There is positive signal (bright white grains) in the synovial tissue (arrow) indicating the presence of RNA transcripts for IL2-Rγ. Panels E and F represent a section through the paw of a CIA mouse 49 days following primary CII immunization. There is an extensive chronic inflammatory reaction in the tissue (*) surrounding the cortical bone tissue. Despite the chronic inflammatory reaction in the tissue no significant IL2-Rγ is present in the lesion late in disease. (PO periosteal; CB cortical bone; SY synovium; AS articular surface; Mag 100×)

[0032] FIG. 4. Tissue-specific expression of differentially regulated genes in lymphoid organs and cells. The presence of specific gene sequences in cDNA libraries generated from the indicated tissues was obtained from the NCBI database using the LocusLink and Unigene databases.

[0033] FIG. 5. Classification of selected annotated genes. Bars indicate the number of the characterized genes that are involved in the specified biological function (A) or pathway (B). The number of genes in each of the five expression patterns is indicated on each bar. Some genes are represented in more than one category.

### BRIEF DESCRIPTION OF TABLES 1 AND 2

[0034] As mentioned above, filed herewith on two compact discs are two copies of Table 1, including Tables 1.1-1.3, and Table 2, including Tables 2.1-2.3. The compact discs are labeled as “Copy 1” and “Copy 2.” Each disc has identical content. The contents of the discs are hereby incorporated by reference in their entireties.

[0035] Table 1 Listing of mouse gene accession numbers, mouse gene name, human mRNA homolog, human protein homologs, and Genbank source of human homolog information. These genes are divided into clusters A through E by expression characteristics as explained herein. Human homologs were identified using unigene and homologene functions at the NCBI database. Further information on the homologous human mRNA sequences can be found in Table 1.1 under the accession number of interest. Similarly, further information on the homologous human protein sequences can be found in Table 1.2, and further information on the “Genbank source” can be found in Table 1.3.

[0036] Table 2 Listing of relevant ESTs. The ESTs are grouped into clusters A through E, as explained herein. Listed are the name of the gene (if known), the accession number of the corresponding homologous human mRNA (if known), the Genbank source number of the human mRNA information, the Genbank accession number for the mouse gene, and a description of similar genes, if known. Further information on the homologous human mRNA sequences corresponding to the ESTs can be found in Table 2.1, under the accession number of interest. Similarly, further information relating to the Genbank source number (human) can be found in Table 2.2, and information corresponding to the Genbank accession numbers (mouse) can be found in Table 2.3.

### DETAILED DESCRIPTION OF THE PREFERRED EMBODIMENT

[0037] Using microarray analysis, the expression of 8734 cDNAs was analyzed during various stages of mouse CIA, an animal model of RA. From the results, a method for the diagnosis and treatment of RA was developed. Of the 8,734 genes analyzed, 330 were induced and 55 were down-regulated greater than two-fold in early or late diseased paws, as compared to normal paws. Hierarchical clustering resulted in five distinct expression patterns that correlated with histopathologic changes in the paw. Of the 385 genes, the identities of 240 are known. These genes are biologically classifiable into 19 functional categories, the largest being immunity and defense, and into 20 pathway categories, including membrane, secreted and extracellular. Of the known genes, the majority have not been described as playing a role in arthritis. Many of these genes are involved in cell proliferation, differentiation, tumorigenesis, apoptosis, and inflammation. Thus, these global gene expression patterns in diseased paws reveal a large number of genes novel to arthritis, and distinct gene expression profiles distinguishing early and late CIA whose further characterization will advance the understanding of the basic mechanisms responsible for arthritis.

[0038] The results of the analysis of the mouse model of RA include a set of differentially expressed genes that can be used for a variety of purposes. The set of differentially expressed genes can be thought of as a “signature” or a “fingerprint” of RA. Thus, some embodiments of the present invention include DNA arrays or genechips that include one or more of the differentially expressed mouse or human genes identified herein. Further embodiments can include a specific subset of the differentially expressed genes that can represent, for example, genes that are only up-regulated in late disease or genes that are only up-regulated in early disease. A “human Rheumatoid Arthritis genechip” can be used to further study the gene expression of RA as well as other auto-immune diseases, in animal models or in human patients.

[0039] The results of the analysis of the mouse model of RA are also useful in identifying and developing various embodiments of a “human Rheumatoid Arthritis genechip” which includes human homologs of the mouse genes identified herein as well as independently identified genes. The chip and the information obtained can be used to develop methods for diagnosis, prognosis, and analysis of the efficacy of treatments.

[0040] The analysis of mouse genes herein is believed to have covered approximately one third of the genes typically expressed in the mouse genome (a comparable number to that expressed in the human genome). Thus, one embodiment is a method for the identification of other mouse genes involved in RA. In order to thoroughly identify the genes that are differentially expressed in the mouse, arrays or genechips that include a thorough representation of mouse mRNAs are analyzed using the same method of analysis that identified the RA-specific genes identified herein. However, using the genes identified in the initial analysis of 8734 genes, human or other mammalian homologs can be identified and the differential expression confirmed. The method is also useful for further identifying genes that are up- and down-regulated in human or other mammalian RA and related conditions. Numerous human homologs of the mouse genes are also differentially regulated in human RA comparably to the differential regulation in mouse CIA.

[0041] Thus a method is described herein that identifies the pattern of specific differentially expressed genes, also referred to as the “signature” or “fingerprint” for a particular disease state or a particular patient. The signature is used to diagnose RA in a patient and to analyze the severity of the disease. The pattern of specifically up and down-regulated genes is compared to a “normal” patient, a patient who does not have RA.

[0042] Briefly, genes that are differentially regulated from the normal in patients with RA are identified by any method known to one of skill in the art. With identification of genes involved in the disease and progression of RA, the genetic data are useful in developing a number of methods for use on a patient who has or may have RA or other arthritides.

[0043] Preferred methods involve the identification of the signature of differential expression of one or more of the identified genes for a specific patient. In some embodiments, the method includes isolation of mRNA from a diseased tissue, blood sample, or synovial fluid sample from a patient. The expression of the genes that are specifically identified as differentially regulated is analyzed. The “signature” is produced as the pattern of up and down-regulated genes within that patient's sample. The signature can be used for diagnostic methods, for prognostic methods, for analysis of the most efficacious treatment for the patient, and for analysis of the efficacy of the treatment or the progression of the disease.

Identifying Human Genes that are Differentially Regulated in RA

[0044] In some embodiments, the genes that are differentially regulated in human RA are identified by a) using mouse genes associated with CIA to identify human and/or other mammalian homologs thereof using database comparisons, b) using mouse genes associated with CIA to isolate homologs from gene libraries of an animal of interest and/or c) using genes that are known to be involved in mammalian RA and mammalian homologs of those genes.

[0045] In a further embodiment, the genes that are differentially regulated in mammalian RA are identified by microarray analysis using mRNAs from a mammal with RA, using a method comparable to that used herein for identification of the mouse genes. Preferably, the methods identify a thorough representation of the genes involved in RA by one method or another.

[0046] In some embodiments, the mRNAs from the mammal with RA are obtained from a tissue, biological fluid or mixture thereof that contains mRNA. In further embodiments, the mRNAs are isolated from diseased synovial tissue or synovial fluid. In still further embodiments, the mRNAs are isolated from a blood sample, a saliva sample, or a urine sample. In preferred embodiments, a patient sample is used for which the expression of genes is altered due to the disease.

[0047] Homologs can be genes or DNAs that are 40% similar or more to the mouse genes identified, alternatively, the homologs are at least 50% similar, including 55% similar, 60% similar, 65% similar, 70% similar, 75% similar, 80% similar, 85% similar, 90% similar, 95% similar, and 99% similar. Homologs that are more similar are generally most closely related to the mouse sequence, and thus are in many cases most likely to exhibit similar differential expression in RA. However, the amount of similarity can vary depending on the importance of the region of the gene identified. For example, if the mouse gene is a kinase, the kinase regions are likely to be more homologous or similar then the other regions. The homologs can be DNAs that hybridize under stringent conditions to the mouse genes identified. The stringent conditions under which a homologous gene or DNA will hybridize with the mouse gene can be defined as follows: 0.1×SSPE, 0.1% SDS wash solution at 65° C. with 2 washes. (1×SSPE is 180 mM NaCl, 10 mM NaH₂PO₄, 1 mM EDTA (pH 7.4)). The identification of mammalian homologs can be accomplished using any method known to one of skill in the art. Any genes that have been identified or will be identified as being involved in the disease can be included. Certain genes having a more central or “important” role in different aspects of the disease are thus identifiable. Thus, the subset of genes that are analyzed or contained in a microarray or genechip can be chosen based on the direct or indirect role the gene is found to play in the disease. Alternatively, subsets can be chosen based on what aspect of the disease is being tested. Thus, in some embodiments, those genes that are identified as being involved in “activating” the disease will be included particularly when diagnosis is the desired result. In a further embodiment, those genes that are identified as involved in “progression” of the disease will be included, particularly when treatment, prognosis, or staging of disease is being analyzed. In a further embodiment, those genes involved in remission, regression, or healing of the disease are included, particularly when prognosis, efficacy of treatment, and/or staging of the disease are being analyzed.

[0048] The above method can be altered and applied to all mammals. Thus, in some embodiments, the patient is a mammal. In a further embodiment, the mammal is a human, primate, dog, cat, or horse. Because the incidence of RA in humans is particularly significant, some embodiments include methods for the diagnosis, prognosis and analysis of human RA. Human homologs are identified by methods known to those of skill in the art. In one embodiment, human homologs are identified using computer programs that search for “closest homologs” by inputting the mouse genes and ESTs identified herein. In a further embodiment, the computer analysis can use “active” portions of the sequences or those parts of the gene sequences that are known to be more highly conserved between mammals. The portions that are more highly conserved can be involved in the activity of the protein expressed therefrom. A variety of computer programs can be used to identify the closest mammalian homologs. In many cases, there can be more than one human homolog that corresponds to the mouse gene.

[0049] In a further embodiment, human homologs are identified by performing the microarray analysis that was used to identify the mouse genes herein. In preferred embodiments, a thorough representation of the human genes that are expressed is analyzed. For example, it is believed that approximately 100,000 genes are actively expressed or included in the human genome. Thus, in order to thoroughly identify those that are involved in the disease RA, a complete representation of the approximately 100,000 genes are analyzed. For example, one or more arrays that contain a thorough representation of the human genome are used to analyze gene expression. In one embodiment, the arrays are from one or more tissues or fluids. In a further embodiment, the arrays are analyzed in duplicate, in triplicate, or in multiple copies. In one embodiment, differential expression can be identified as at least about a 1.4 to 2 fold difference in expression from normal. In a further embodiment, the differential expression is identified as about a 1.6 to 2 fold difference in expression. In a further embodiment, the genes are identified as differentially expressed in RA when there is at least about a 2 fold difference in expression from normal. In a further embodiment, the genes are identified as differentially expressed in RA when there is at least about a 2.3 fold difference in expression from normal. In a further embodiment, the genes are identified as differentially expressed in RA when there is at least about a 2.5 fold difference in expression from normal, including at least about 2.6 fold, 2.7 fold, 2.8 fold, 2.9 fold, 3 fold, 3.5 fold, 4 fold, and 5 fold. However, some genes can show a higher difference in expression than others. These genes can be more involved or alternatively, equally involved in the manifestation of disease as a gene that is less differentially expressed.

[0050] From the above analysis, a “signature” or “fingerprint” can be produced that includes the genes that are differentially expressed in the disease and the range of expression that can be seen among different patients. In one embodiment, the differential expression can be due to different aspects and manifestations of the disease. For example, the fingerprint can be a fingerprint of early RA, late RA, mild RA, extreme RA, RA in remission, a manifestation of RA with little pain, but considerable deformity, a manifestation of RA with considerable pain, but little deformity, etc.

[0051] The expression of many of the genes identified is confirmed using alternative methods known to one of skill in the art, including Northern blotting, quantitative PCR techniques such as real-time PCR, or other methods of expression analysis. Alternatively, the translation products and expression can be analyzed by methods known to one of skill in the art, such as Western blotting, activity assays, etc.

[0052] In a further embodiment, the genes identified as part of the “signature” or “fingerprint” are further analyzed as to their involvement in the disease. In one embodiment, a gene is further analyzed by any method known to one of skill in the art and can identify the involvement in activation, progression, pain manifestation, deformation, and treatment of the disease. Patients that express certain genes or subsets identified above will often show a greater response to certain types of treatments then others. For example, if one patient expresses high amounts of IL-2, that patient would respond better to treatments that target IL-2 activity, expression, or the downstream effects of IL-2.

[0053] One embodiment of this “signature” or “fingerprint” is an array or a genechip that includes the genes that are identified as differentially expressed in one or all manifestations of RA, which can be referred to as a “human Rheumatoid Arthritis genechip.” A variety of genechips can be produced that are specific to different aspects of the disease. In one embodiment, a genechip can be produced with only those genes that are identified as possessing key roles in each aspect of the disease. In a further embodiment, a genechip can be produced that includes only those genes that are expressed late in disease or in severe disease.

Method of Diagnosis Prognosis, and Treatment Analysis of a Patient with Rheumatoid Arthritis

[0054] The genes that are identified above as being involved in RA can be analyzed as to differential expression in a specific patient by any means known to one of skill in the art. Some embodiments involve isolation of the mRNA from a patient sample.

[0055] Briefly, mRNA is isolated from at least one tissue or sample from the patient. In one embodiment, the sample is a diseased tissue sample, including but not limited to synovial tissue. In a further embodiment, the sample is a fluid containing disease cells or mRNA, including, but not limited to, synovial fluid, and blood.

[0056] The mRNA can then be used to analyze gene expression by any method known to one of skill in the art. In one embodiment, the mRNA is used to analyze a “human Rheumatoid Arthritis genechip” or array. From this analysis, a specific patient “signature” of the genes and amount of differential expression is produced. The amount of differential expression is compared to a normal patient. In one embodiment, the ranges and values of expression for a normal patient are derived using at least 2 normal patients, including at least 3, at least 4, at least 5, at least 10, at least 20, and at least 50. In a further embodiment, the ranges and values of expression for a normal patient are derived using a statistical sampling of the population, or a statistical sampling of the area, ethnic group, age group, social group, or sex. In a further embodiment, the range and values of gene expression for a normal patient are derived from the patient before disease or during remission.

[0057] The results of the signature can be used in any one or more of the methods disclosed herein. Alternatively, one or more of the analyses can be included in one chip or array. The specific signature can include the results of the expression levels of one or more genes in that specific patient. In one embodiment, the signature is the results of the expression levels of at least 10 genes, preferably 40 genes, however, the signature can include the results of 50, 60, 70, 80, 90, 100, 150, 200, 250, 500, 750, 1000, 2000, 5000, and 10,000 genes which have been identified as being differentially expressed in RA. Some genes are more important or more involved in the manifestation or activation of the disease. Thus, the signature can require fewer genes when those that are more important have been identified and included.

[0058] In one embodiment, the results of the signature are used in a method of diagnosis. The method of diagnosis can include, a method of diagnosis of rheumatoid arthritis, a method of diagnosis of severity of the disease, a method of diagnosis of a manifestation of the disease and can include any or all of the above. Many of the same genes that are differentially expressed or involved in the manifestation of RA can also be involved in a different autoimmune disease. Alternatively, many of the same genes that are differentially expressed or involved in the manifestation of RA can also be involved in a different arthritide. Thus, the method of diagnosis can diagnose an arthritic or autoimmune disease, including, but not limited to, Lupus, Juvenile RA, Ankylosing Spondylitis, gout, osteoarthritis, fibrositis and fibromyalgia, Scleroderma, and even the autoimmune manifestations of Lyme disease and Streptococcus infection.

[0059] In a further embodiment, the results of the signature can be used in a method for prognosis of disease. The prognosis in various patients can vary tremendously. Some patients may progress very rapidly and may need a very aggressive treatment plan. Other patients may have a very mild version and may progress very slowly, requiring a more subtle treatment plan. This can be important when considering side effects, quality of life, and patient needs.

[0060] In a further embodiment, the results of the signature are used in a method of identification of the most efficacious treatment for that specific disease and for that specific patient. The treatment and the response to a drug can depend on which genes are being expressed. For example, in its most simple form, a patient with little IL-2 expression would not be best treated using a treatment that targets IL-2. However, the choice of a treatment method can involve a number of factors besides the gene expression of specific genes, including, the form of the disease, the severity of the disease, the manifestation of the disease, and the needs and wants of the patient. Many of these factors can be identified using one of the methods included herein.

[0061] In a further embodiment, the results are used to identify single nucleotide polymorphisms (SNPs), mutations, or Restriction Fragment Length Polymorphisms (RFLPs) associated with RA or other autoimmune diseases or other arthritides. The genes that are identified can be included in one or all of the genechips, arrays or analyses herein. In an alternative embodiment, a genechip that includes single nucleotide polymorphisms (SNPs), mutations, or Restriction Fragment Length Polymorphisms (RFLPs) is produced and used for diagnosis, prognosis, and/or identification of the best treatment or drug for use in treating RA.

Method of Identifying Targets for Drugs

[0062] In a further embodiment, the results of the signature are used to identify drug targets. Any or all of the genes identified herein and included in the signature or on a rheumatoid arthritis array can be used to further identify drugs or treatments that would target that gene or gene product.

[0063] Methods of identifying targets can include any method known to one of skill in the art, including, but not limited to: producing and testing small molecules, oligonucleotides (including antisense, RNAi and triplex formers), antibodies, and drugs that target any of the genes or gene products identified herein. Alternatively, gene therapy can be used to down-regulate, up-regulate, or express proteins or gene products identified herein.

[0064] The present methods will be further described by use of the following examples.

### EXAMPLES

[0065] In some of the following examples, the paws of mice with collagen-induced arthritis were analyzed in early disease and late disease by isolation of the RNA and microarray analysis. The results were confirmed using RT-PCR and in situ hybridization. Down- and up-regulation of genes was identified and the genes were clustered into groups. Human homologs are identified and the expression patterns are used to diagnose RA, to analyze the severity of disease in a patient, and to identify new treatments for arthritis. A number of genes were identified that previously had not been identified as being involved in arthritis; the genes thus identified can represent gene targets for drug therapy.

[0066] In the Examples relating to mouse experiments, DBA/1 mice were immunized with type II bovine collagen to induce arthritis, and mRNA was isolated from paws of non-immunized mice and from severely affected paws of mice at 28 days (acute disease model) and 49 days (chronic disease model) following the primary collagen injection. A single common reference control was used for all microarrays consisting of mRNA derived from the whole of a postnatal day 1 mouse, and all mRNAs were hybridized to duplicate microarrays (Incyte Pharmaceuticals, Inc., Palo Alto, Calif.). Among the 385 disease-specific genes differentially regulated in CIA are 102 expressed sequence tags (ESTs). Microarray analyses will help in further mapping out differences in gene expression between normal synovium and the synovium of acute and chronic CIA, including the identification of novel genes involved in arthritis.

### Example 1

### Production of Mice with Collagen-Induced Arthritis (CIA)

[0067] Mice with collagen-induced arthritis were used as a model for RA. Male DBA/IJ mice, 6 to 8 weeks of age, were purchased from The Jackson Laboratory (Bar Harbor, Me.). Mice were housed in the animal care facility at The Children's Hospital Research Foundation (Cincinnati, Ohio) under Institutional Animal Care and Use Committee approved conditions. Arthritis was induced with bovine type II collagen (CII, Elastin Products Co., Owensville, Mo.), as previously described (Thornton, et al. J. Immunol (2000) 165:1557-1563), the disclosure of which is hereby incorporated by reference in its entirety. Briefly, mice were injected intradermally with 100 μg of CII in complete Freund's adjuvant (CFA) at the base of the tail on day 0, and a similar booster was administered on day 21. Mice were evaluated for arthritis using an established macroscopic scoring system ranging from 0 to 4 (0=no detectable arthritis, 1=swelling and/or redness of paw or one digit, 2=two joints involved, 3=three or four joints involved and 4=severe arthritis of the entire paw and digits). At day 28 (early disease) and day 49 (late disease) following primary immunization, mice were sacrificed. Hind paws with an arthritic score of four were removed for mRNA analysis and in situ hybridizations (ISH). Paws from mice of the same age not treated with CII were used as normal controls.

### Example 2

### mRNA Expression Profiling of Early and Late CIA

[0068] Differential gene expression in paws of mice with CIA was analyzed in early (day 28) and late (day 49) arthritis and compared to that of paws from normal mice. These time points were chosen based on earlier studies that demonstrated their correlation with distinct histologic appearance and mRNA expression patterns by RPA.

[0069] RNA was isolated from paws that were quick frozen in liquid nitrogen and stored at −80° C. Frozen paws were minced with a scalpel and homogenized with a Polytron Tissue Tearor (Biospec Products, Bartlesville, Okla.) in appropriate volumes of RNA Stat-60 (Tel-Test, Friendswood, Tex.). Total RNA was extracted from the tissue homogenates according to the manufacturer's instructions. Pooled total RNA from normal (4 paws), early arthritic (3 paws) and late arthritic (4 paws) paws was used to isolate polyA+ RNA by the Oligotex mRNA isolation kit (Qiagen, Valencia, Calif.) according to the manufacturer's instructions. RNA concentrations were measured by fluorometry using the Ribogreen RNA Quantification Kit (Molecular Probes, Inc., Eugene, Oreg.).

[0070] DNA microarray analysis was performed as follows: mRNA of a whole 1 day old mouse was used for normalization of gene expression levels across all six microarray chips. Competitive hybridizations with Cy3 labeled whole 1 day old mouse mRNA versus Cy5 labeled normal paw mRNA, Cy5 labeled early paw mRNA or Cy5 labeled late paw mRNA were performed. Each sample (normal, early and late) was labeled and hybridized to two microarray chips. Hybridizations were performed on the mouse GEM1 array by Incyte Genomics (Palo Alto, Calif.).

[0071] Primary data were examined using Incyte Gemtools software and GeneSpring version 4.0.4 software (Silicon Genetics, Redwood City, Calif.). Defective cDNA spots (irregular geometry, scratched, or <40% area compared to average) or spot fluorescence hybridizations with signal to noise ratios less than 2.5:1 were eliminated from the data set. Data sets were subjected to normalization first within each microarray experiment such that the median of the Cy5 channel was balanced against the ratio of the Cy3 channel (k*(MedianCy3)=MedianCy5, where k is the ratio of the median intensities in each). Each microarray contained control genes present as non-mammalian single gene “spikes” or “complex targets”. The complex targets consisted of probe-sets that contain a pool of cellular genes expressed in most cell types. In addition, each experimental mRNA sample was augmented with incremental amounts of non-mammalian gene RNA (2×, 4×, 16×, etc) to permit assessment of the dynamic range attained within each microarray. Little variation was observed across the microarray series with respect to the 192 control genes (not shown), providing support for inter-array comparisons of temporally regulated genes. Genes were clustered according to their expression pattern by subjecting the log-transformed data (R=log₂Cy5/(kCy3), where R is the log of the expression ratio for each gene) to the hierarchical tree clustering algorithm as implemented in the GeneSpring program (Silicon Genetics). The hierarchical tree analysis was performed using a minimum distance value of 0.001, separation ratio of 0.5 and the standard correlation distance definition.

[0072] Mouse sense and antisense RNA probes were synthesized using the Stratagene RNA Transcription Kit (Stratagene, La Jolla, Calif.). T3 or T7 RNA polymerase produced ³⁵S-radiolabeled antisense or sense single-stranded RNA probes, respectively. A sense probe generated from an unrelated mouse gene was used as a negative control for in situ hybridization.

[0073] For early and late disease, mRNA from paws with severe arthritis (score of 4) were used to generate probes that were hybridized to Incyte Mouse GEM1 chips, as was mRNA from normal mouse paws. Hybridizations were conducted on duplicate chips, allowing for the elimination of genes whose expression levels differed by greater than 50% between the duplicate samples. 8,734 cDNAs, including known genes and ESTs, were represented on the microarray chip. 385 genes exhibited a greater than two-fold difference in expression between arthritic and normal paws and were selected for further analysis. Expression of 304 of these genes differed only between arthritic and normal paws, and expression of 81 of these genes differed between early and late arthritis. However, some of the genes identified were duplicates. Thus, the genes listed in Table 1 include some duplicates.

[0074] FIG. 1 demonstrates the 385 selected genes and their average levels of expression as compared to normal tissue values. The majority of genes were more highly expressed in arthritic paws as compared to normal paws. Genes were clustered according to their expression pattern during disease by hierarchical tree analysis. The resulting hierarchical tree structure revealed five distinct patterns of expression. Approximately half of the genes, represented by clusters D and E in Table 1 (225 genes, 58.4%), were upregulated both in early and late disease. It was possible to separate these genes into those with similar expression levels in early and late disease (cluster E in Table 1) and genes whose expression levels further increased during late disease (cluster D in Table 1). These may represent two distinct patterns or a continuum of coordinately regulated gene groups. Cluster C in Table 1 (105 genes, 27.3%) represents genes principally upregulated in early disease. Cluster B in Table 1 (18 genes, 4.7%) represents genes predominantly upregulated in late disease. Cluster A in Table 1 (37 genes, 9.6%) represents genes downregulated during both early and late disease, compared to normal paws. The individual genes and the number of ESTs belonging to each cluster are listed in Table 1. Please see Table 2 for the EST accession number and Table 3 for a schematic representation of the characteristics of Clusters A through E.

TABLE 1
Sequences - Human Homologs and Accession Numbers

| | | | | |
|---|---|---|---|---|
| | | Human | Human | |
| Mouse # | Name (mouse) | mRNA # | Protein # | Genbank Source |

Cluster A:

| | | | | |
|---|---|---|---|---|
| W09829 | trefoil factor 2 (spasmolytic protein 1) | NM_005423 | NP_005414 | AH003622 |
| W36838 | uteroglobin | NM_003357 | NP_003348 | BC004481 |
| AA028678 | palate, lung, and nasal epithelium | NM_016583 | NP_057667 | BC012549 |
| | expressed transcript | | | |
| AA047966 | four and a half LIM domains 1 | NM_001449 | NP_001440 | BC010998 |
| AA108401 | solute carrier family 27 (fatty acid | NM_003645 | NP_003636 | D88308 |
| | transporter) | | | |
| AA145089 | potassium voltage-gated channel, | NM_000238 | NP_000229 | U04270 |
| | subfamily H, member 2 | | | |
| AA241859 | betaine-homocysteine methyltransferase | NM_001713 | NP_001704 | U50929 |
| AA271284 | myoglobin | NM_005368 | NP_005359 | X00371, X00372, X00373 |
| AA261313 | nuclear receptor subfamily 1, group H, | NM_005123 | NP_005114 | U68233 |
| | member 4 | | | |
| AA275042 | amine N-sulfotransferase | NM_001054.1 | NP_001045 | 59% homologous |
| AA268120 | cytochrome P450, steroid inducible 3a11 | NM_007818 | NP_001045 | X 60452 |
| AA501052 | cardiac morphogenesis | | | 62% homologous |
| | | | | AW755250 |

Cluster B:

| | | | | |
|---|---|---|---|---|
| W11965 | enolase 3, β muscle | NM_001976 | NP_001967 | X51957, X56832 |
| W64550 | tumor-associated calcium signal | NM_002353 | NP_002344 | X77753 |
| | transducer 2 | | | |
| AA388939 | IG α chain C region | NM_001810 | NP_001801 | AL109804 |
| W34420 | ATPase, Ca++ transporting, cardiac | NM_004320 | NP_004311 | AH005190 |
| | muscle, fast twitch 1 | | | |
| AA015155 | S100 calcium binding protein A3 | NM_002960 | NP_002951 | Z18948 |
| AA204246 | Mus musculus dystonin (Bpag1-n) | NM_001723 | NP_001714 | L11690, M69225 |
| W62819 | neuronal protein 3.1 | NM_004772 | NP_004763 | U30521 |
| W64937 | angiopoietin related protein 2 | | | AF007150, AI467954, |
| | | | | AI 081 |

Cluster C:

| | | | | |
|---|---|---|---|---|
| W82159 | Fc receptor, IgG, low affinity III | NM_000570 | NP_000561 | X16863 |
| AI894016 | complement component 1, q | XM_031238 | XP_031238 | AK057792, BC009016 |
| | subcomponent, c | | | |
| AI324436 | Phospholipase A2 group VII | NM_005084 | NP_005075 | U20157 |
| AA116505 | CD53 antigen | NM_000560 | NP_000551 | AH011005, M37033 |
| AA177717 | Interleukin 1 receptor, type I | NM_000877 | NP_000868 | M27492 |
| AI322933 | Interleukin 4 receptor, α | NM_000418 | NP_000409 | X52425 |
| AA220007 | CD68 antigen | NM_001251 | NP_001242 | S57235 |
| AA289476 | Chemokine (C—C) receptor 2 | NM_000647 | NP_000638 | U03882 |
| AA289559 | Ecotropic viral integration site 2 | NM_014210 | NP_055025 | AH002689 |
| AI508758 | CD14 antigen | NM_000591 | NP_000582 | X13334 |
| AA286506 | Interleukin 4 receptor, α | NM_000418 | NP_000409 | X52425 |
| AA467489 | Integrin β 2 (Cd18) | NM_000211 | NP_000202 | M15395 |
| AA423373 | Glycoprotein 49 A | NM_024318 | NP_077294 | AF041262 |
| AA435060 | Leucocyte specific transcript 1 | | | LY117 |
| AA475774 | Cathepsin C | NM_001814 | NP_001805 | AU076460, X87212 |
| AA497620 | small proline-rich protein 2A | NM_005988 | NP_005979 | X53064 |
| W11889 | Hemochromatosis | NM_000410 | NP_000401 | U60319 |
| W13905 | Fibrinogen/angiopoietin-related protein | NM_016109 | NP_057193 | AF153606, AF202636 |
| W96914 | lysyl oxidase | NM_002317 | NP_002308 | AF039290, AF039291 |
| AA080231 | mannosidase 2, α B1 | NM_000528 | NP_000519 | AH006687 |
| AA152885 | small inducible cytokine subfamily B | NM_006419 | NP_006417 | 47% homologous |
| | (Cys-X-Cys) | | | AF044197 |
| AA170386 | colony stimulating factor 2 receptor, β 2, | No human | | |
| | low-affinity | genes | | |
| AA201097 | protein tyrosine phosphatase, receptor | NM_002838 | NP_002829 | Y00062, Y00638 |
| | type, C | | | |
| AA197349 | baculoviral LAP repeat-containing 2 | NM_001166 | NP_001157 | L49431, U37547 |
| AA239171 | elastin | NM_000501 | NP_000492 | AH007100 |
| AA268708 | Mus musculus hypoxia induced gene 2 | No human | | |
| | (Hig2) | genes | | |
| AA259959 | CD37 antigen | NM_001774 | NP_001765 | X14046 |
| AA260521 | uncoupling protein 2, mitochondrial | NM_003355 | NP_003346 | AF096289 |
| AA274104 | interleukin 2 receptor, γ chain | NM_000206 | NP_000197 | D11086 |
| AA387058 | apoptotic protease activating factor 1 | NM_013229 | NP_037361 | |
| AA547555 | CDC28 protein kinase 1 | NM_001826 | NP_001817 | X54941 |
| AA140523 | Rac GTPase-activating protein 1 | NM_013277 | NP_037409 | AL136794 |
| AA521764 | receptor (calcitonin) activity modifying | NM_005854 | NP_005845 | AJ001015 |
| | protein 2 | | | |
| AA051654 | metallothionein 1 | M 10942 | AAA5999587 | 85% homologous |
| AA265259 | oncostatin receptor | NM_003999 | NP_003990 | U60805 |
| AA178121 | cathepsin S | NM_004079 | NP_004070 | AL356292, BC002642, B |
| | | | | Q006623, M90696 |
| AA210306 | a disintegrin and metalloproteinase | NM_003816 | NP_003807 | U41766 |
| | domain 9 | | | |
| AA230451 | S100 calcium binding protein A8 | NM_002964 | NP_002955 | A12027, Y00278 |
| | (calgranulin A) | | | |
| AA268219 | macrophage expressed gene 1 | No human | | |
| | | genes | | |
| W41459 | Eukaryotic translation initiation factor | NM_001412 | NP_001403 | L18960 |
| | 1A | | | |
| AA003549 | Homolog of human ftp-3 | NM_003011 | NP_003002 | M93651 |
| AA063753 | ATP-binding cassette, sub-family A | NM_005502 | NP_005493 | AF165281, AF275948 |
| | (ABC1), member 1 | | | |
| AI594919 | Intersectin (SH3 domain protein 1 A) | NM_003024 | NP_003015 | AF064244 |
| AI385509 | Nuclear factor of κ light polypeptide | NM_002502 | NP_002493 | X61498 |
| | enhancer p49/p100 | | | |
| AA087193 | Lipocalin 2 | NM_005564 | NP_005555 | X99133 |
| AA175094 | Myristoylated alanine rich protein kinase | NM_002356 | NP_002347 | D10522 |
| | C substrate | | | |
| AI451276 | SH3 domain protein 3 | NM_012383 | NP_036515 | BC007459 |
| AA209640 | Histocompatibility 2, complement | NM_001710 | NP_001701 | BC004143, L15702 |
| | component factor B | | | |
| AA276440 | Selenoprotein P, plasma, 1 | NM_005410 | NP_005401 | Z11793 |
| AA432934 | Neuropilin | NM_003873 | NP_003864 | AF018956 |
| AA499926 | Peptidylprolyl isomerase A | NM_021130 | NP_066953 | X52851 |
| AA538499 | Phosphatidylinositol-4-phosphate | NM_005028 | NP_005019 | BC018034 |
| | 5-kinase, type II, α | | | |
| AA414612 | Capping protein α 1 | NM_006135 | NP_006126 | U56637 |
| W42321 | Pentaxin related gene | NM_002852 | NP_002843 | X63613 |
| AA162537 | Type II transmembrane protein MDL-1 | NM_013252 | NP_037384 | AJ271684 |
| AI646186 | Schlafen 4 | NM_018042 | NP_060512 | 41% homologous |
| AA462202 | BP-3 alloantigen | NM_004334 | NP_004325 | D21878 |
| AI322278 | Pyruvate dehydrogenase kinase 4 | NM_002612 | NP_002603 | U54617 |
| W98241 | proprotein convertase subtilisin/kexin | NM_006200 | NP_006191 | BC012064 |
| | type 5 | | | |
| AA172456 | small inducible cytokine A12 | NM_006273 | NP_006264 | X71087 |
| AA178155 | small inducible cytokine A4 | NM_002984 | NP_002975 | J04130 |
| AA267811 | lymphocyte cytosolic protein 2 | NM_005565 | NP_005556 | U20158 |
| AA144482 | chemokine (C—C) receptor 5 | NM_000579 | NP_000570 | AH005786 |
| AA266002 | B-cell leukemia/lymphoma 3 | NM_005178 | NP_005169 | M31732 |

Cluster D:

| | | | | |
|---|---|---|---|---|
| AA064293 | cartilage oligomeric matrix protein | NM_000095 | NP_000086 | L32137 |
| AI552105 | alkaline phosphatase 2, liver | NM_000478 | NP_000469 | AB011406, AH005272 |
| AA145458 | fibronectin 1 | NM_002026 | NP_002017 | M15801, X02761 |
| AA177218 | IG α chain C region | NM_001810 | NP_001801 | AL109804 |
| W63981 | fibromodulin | NM_002023 | NP_002014 | U05291, X75546 |
| AA030995 | peptidylprolyl isomerase B | NM_012117 | NP_036249 | S62077 |
| AA241281 | aquaporin 1 | NM_000385 | NP_000376 | M77829, U41517 |
| AA260949 | growth arrest and DNA-damage- | NM_006705 | NP_006696 | AF079806, AF265659 |
| | inducible, γ | | | |
| AA518165 | tissue inhibitor of metalloproteinase 2 | | A37128 | 100% homologous |
| W33786 | procollagen, type VI, α 1 | NM_001848 | NP_001839 | M20776, X15879, |
| AA000107 | procollagen, type XI, α 2 | NM_080679 | NP_542410 | AH006115, U32169 |
| AI323131 | thrombospondin 3 | NM_007112 | NP_009043 | L38969 |
| AA073904 | dickkopf homolog 3 (Xenopus laevis) | NM_013253 | NP_037385 | AF177396 |
| AA109900 | hemoglobin α, adult chain 1 | | P01922 | 85% homologous |
| AA537116 | immunoglobulin superfamily with | NM_005545 | NP_005536 | AB003184 |
| | leucine-rich repeats | | | |
| AI327504 | eukaryotic translation elongation factor 1 | NM_001958 | NP_001949 | X70940 |
| | α 2 | | | |

Cluster E:

| | | | | |
|---|---|---|---|---|
| W13151 | thymus cell antigen 1, τ | NM_006288 | NP_006279 | AL161958 |
| W54287 | Biglycan | NM_001711 | NP_001702 | AH002674, BC002416 |
| W89883 | procollagen, type III, α 1 | NM_000090 | NP_000081 | AI755052, M26939, X14420 |
| AA175226 | complement component 1, r | NM_001733 | NP_001724 | X04701 |
| | subcomponent | | | |
| AA242149 | FK506 binding protein 7 (23 kDa) | NM_017946 | NP_060416 | |
| AA209006 | complement component 1, s | | P09871 | 75% homologous |
| | subcomponent | | | |
| AA270625 | tenascin C | NM_015904 | NP_056988 | AF078035, AJ006776 |
| AA538511 | histocompatibility 2, L region | | S48134 | 69% homologous |
| W10072 | insulin-like growth factor 1 | NM_000618 | NP_000609 | X57025 |
| W14393 | Sid394p | NM_006815 | NP_006806 | BC 025957 |
| W11571 | hexokinase 1 | NM_022361 | NP_071756 | BC022323 |
| W14289 | cathepsin Z | NM_001336 | NP_001327 | AF136273 |
| W16254 | tubulin, β 5 | NM_001069 | NP_001060 | X79535 |
| W17813 | Talin | NM_006289 | NP_006280 | |
| W82677 | bone morphogenetic protein 1 | NM_001199 | NP_001190 | M22488 |
| W83904 | peptidylprolyl isomerase C | NM_000943 | NP_000934 | BC002678 |
| W89354 | procollagen-lysine, 2-oxoglutarate | NM_001084 | NP_001075 | BC011674 |
| | 5-dioxygenase 3 | | | |
| W99856 | procollagen, type V, α 1 | NM_000093 | NP_000084 | D90279, L38808, M76729 |
| AA002439 | annexin A5 | NM_001154 | NP_001145 | AH004914, J03745 |
| AA030294 | Mus musculus frizzled-1 | NM_003505 | NP_003496 | AB017363 |
| AA030780 | peroxisomal δ3, δ-2-enoyl-Coenzyme A | NM_006117 | NP_006108 | AF153612 |
| | isomerase | | | |
| AA038395 | Ras suppressor protein 1 | NM_012425 | NP_036557 | L12535 |
| AA060268 | phospholipase D3 | NM_012268 | NP_036400 | U60644 |
| AA067258 | Calumenin | NM_001219 | NP_001210 | AF013759, U67280 |
| AA110872 | amyloid β (A4) precursor protein | NM_000484 | NP_000475 | AH005295 |
| AA118715 | CD97 antigen | NM_001784 | NP_001775 | X84700 |
| AA122791 | histocompatibility 2, Q region locus 7 | | I37519 | 68% homologous |
| AA222201 | butyrate response factor 1 | NM_005141 | NP_005132 | J00129, M64983 |
| AA242611 | follistatin-like | NM_007085 | NP_009016 | BC000055 |
| AA397114 | annexin A4 | NM_001153 | NP_001144 | D78152, M82809 |
| AA259366 | Trp4-associated protein TAP1 | NM_015638 | NP_056453 | BC013144 |
| AA259551 | eukaryotic translation elongation factor 1 | NM_006452 | NP_006443 | BC010273 |
| | α 1 | | | |
| AA271275 | metallocarboxypeptidase CPX-1 | NM_019609 | NP_062555 | |
| AA260248 | growth factor receptor bound protein 10 | NM_005311 | NP_005302 | D86962 |
| AA437882 | ribosomal protein L9 | NM_000661 | NP_000652 | BG829769, U09953 |
| AA396298 | RNAse 4 | NM_002937 | NP_002928 | BC015520 |
| AA474964 | Lactotransferrin | NM_002343 | NP_002334 | X53961 |
| AA499296 | annexin A6 | NM_001155 | NP_001146 | J03578, X77673 |
| AA547428 | protein kinase, cAMP dependent, | NM_002731 | NP_002722 | M34181 |
| | catalytic, β | | | |
| W18828 | dihydropyrimidinase-like 3 | NM_001387 | NP_001378 | D78014 |
| AA048915 | guanine nucleotide binding protein, β-2, | NM_003922 | NP_003913 | U50078 |
| | related sequence 1 | | | |
| W14837 | protease, cysteine, 1 | NM_005606 | NP_005597 | BC003061 |
| W18376 | golgi vesicular membrane trafficking | NM_005868 | NP_005859 | AF007551 |
| | protein p18 | | | |
| W80177 | matrix metalloproteinase 2 | NM_004530 | NP_004521 | AH002654 |
| AA003452 | thrombospondin 4 | NM_003248 | NP_003239 | Z19585 |
| AA073604 | procollagen, type I, α 1 | NM_000088 | NP_000079 | Z74615 |
| AA124340 | transforming growth factor, β receptor | No human | | |
| | III | genes | | |
| AA241784 | insulin-like growth factor binding | NM_000599 | NP_000590 | |
| | protein 5 | | | |
| AA268082 | Lumican | NM_002345 | NP_002336 | BC007038 |
| AA260280 | procollagen, type III, α 1 | NM_000090 | NP_000081 | AI755052, M26939, X14420 |
| W13698 | FK506 binding protein 9 | NM_007270 | NP_009201 | BC011872 |
| W14113 | twist gene homolog, (Drosophila) | NM_000474 | NP_000465 | U80998, X99268 |
| AA052081 | Atpase, class I, type 8B, member 2 | No human | | |
| | | genes | | |
| W89518 | annexin A2 | MM_004039 | NP_004030 | D00017 |
| AI894006 | procollagen, type XI, α 1 | NM_001854 | NP_001845 | AU118365, J04177, U12139 |
| AA002481 | integrin β 5 | NM_002213 | NP_002204 | BC006541 |
| AA023549 | procollagen, type V, α 2 | NM_000393 | NP_000384 | BC015705, M58529, Y14690 |
| AA033050 | serine protease inhibitor 4 | NM_006216 | NP_006207 | BC015663 |
| AA037995 | microfibrillar associated protein 5 | NM_003480 | NP_003471 | AH007047 |
| AA059524 | procollagen, type VI, α 3 | NM_004369 | NP_004360 | X52022 |
| AA066921 | integral membrane protein 2 | NM_004867 | NP_004858 | AF038953 |
| AA108363 | ribosomal protein L3 | NM_000967 | NP_000958 | BC008492, BC012146 |
| AA108928 | secreted phosphoprotein 1 | NM_000582 | NP_000573 | AF052124 |
| AA220699 | transcobalamin 2 | NM_000355 | NP_000346 | AF047576, M60396 |
| AA272097 | fibroblast growth factor receptor 1 | NM_000604 | NP_000595 | M34641, X66945 |
| AA451495 | protocadherin 13 | NM_003735 | NP_003726 | |
| AA509765 | Endomucin | NM_016241 | NP_057325 | |
| AA542013 | fibroblast growth factor receptor 1 | NM_000604 | NP_000595 | M34641, X66945 |
| AA047991 | keratin complex 2, basic, gene 1 | NM_001004 | NP_000995 | BC005354, BC005920, BC007573 |
| W17771 | cathelin-like protein | NM_004345 | NP_004336 | Z38026 |
| AA221044 | histocompatibility 2, L region | | S48134 | 69% homologous |
| AI322868 | myristoylated alanine rich protein kinase | NM_002356 | NP_002347 | D10522 |
| | C substrate | | | |
| AA024088 | SH3 domain protein 3 | NM_012383 | NP_036515 | BC007459 |
| W18121 | histocompatibility 2, complement | NM_001710 | NP_001701 | BC004143, L15702 |
| | component factor B | | | |
| AA266975 | cell division cycle 42 homolog | NM_001791 | NP_001782 | AL121735, BC003682, M57298 |
| | (S. cerevisiae) | | | |
| AA172527 | ATP-binding cassette, sub-family G, | NM_004915 | NP_004906 | X91249 |
| | member 1 | | | |
| AA175651 | caspase 11 | NM_004347 | NP_004338 | U28015 |
| AA260476 | calpain 6 | NM_014289 | NP_055104 | AL031117 |
| W98807 | FXYD domain-containing ion transport | NM_014164 | NP_054883 | AA044211, AA296696, AF161462, |
| | regulator 5 | | | BG025158 |
| AA068750 | stromal cell derived factor 1 | NM_000609 | NP_000600 | U16752 |
| AA109951 | β-2 microglobulin | NM_004048 | NP_004039 | AB021288 |
| AA200339 | secretory leukocyte protease inhibitor | NM_003064 | NP_003055 | M74444, X04470 |
| AA245698 | regulator of G-protein signaling 5 | NM_003617 | NP_003608 | AB008109 |
| AA268592 | transforming growth factor, β induced, | NM_000358 | NP_000349 | M77349 |
| | 68 kDa | | | |
| AA272807 | histocompatibility 2, class II antigen A, | NM_002122 | NP_002113 | L34083, L46875, M20431 |
| | α | | | |
| W10023 | catenin β | NM_001904 | NP_001895 | X87838 |
| W12260 | surfeit gene 4 | NM_017503 | NP_059973 | BC014411, BM789997 |
| W14138 | kallikrein 3, plasma | No human | | |
| | | genes | | |
| W14540 | histocompatibility 2, K region | | P18462 | 68% homologous |
| W34612 | transglutaminase 2, C polypeptide | NM_004613 | NP_004604 | M55153 |
| W64075 | proline rich protein expressed in brain | NM_014764 | NP_055579 | D31767 |
| W81878 | osteoblast specific factor 2 | NM_006475 | NP_006466 | D13666 |
| W82141 | lysosomal membrane glycoprotein 1 | NM_005561 | NP_005552 | J04182 |
| W82946 | benzodiazepine receptor, peripheral | NM_000714 | NP_000705 | AH000829, M36035, U12421 |
| AA119072 | ceroid-lipofuscinosis, neuronal 2 | NM_000391 | NP_000382 | AF039704 |
| AA123008 | membrane bound C2 domain containing | NM_015292 | NP_056107 | BC004998 |
| | protein | | | |
| AA137942 | immunoglobulin J chain precursor | | P01591 | 77% homologous |
| AA172867 | purine-nucleoside phosphorylase | NM_000270 | NP_000261 | X00737 |
| AA178779 | interferon concensus sequence binding | NM_002163 | NP_002154 | M91196 |
| | protein | | | |
| AA185869 | β-1,4 N-actylgalactosaminyltransferase | NM_001478 | NP_001469 | L76079, M83651 |
| AA209884 | guanine nucleotide binding protein (G | NM_004125 | NP_004116 | BC015391 |
| | protein), γ 10 | | | |
| AA241132 | coatomer protein complex, subunit γ 1 | NM_016128 | NP_057212 | AF100756 |
| AA230649 | histocompatibility 2, class II, locus Dma | NM_006120 | NP_006111 | X62744 |
| AA260654 | TG interacting factor | NM_003244 | NP_003235 | X89750 |
| AA268148 | eukaryotic translation elongation factor | NM_007086 | NP_009017 | AJ006266 |
| | 1-β homolog | | | |
| AA396152 | CD44 antigen | NM_000610 | NP_000601 | AJ251595 |
| AA271576 | receptor (TNFRSF)-interacting serine- | NM_003804 | NP_003795 | U50062 |
| | threonine kinase 1 | | | |
| AA276030 | ATPase-like vacuolar proton channel | NM_001694 | NP_001685 | BC009290, BI548787 |
| AA414089 | heterogeneous nuclear ribonucleoprotein | NM_014740 | NP_055555 | D21853 |
| | D-like | | | |
| AA413831 | p100 co-activator | NM_014390 | NP_055205 | U22055 |
| AA060205 | butyrate response factor 1 | NM_005141 | NP_005132 | J00129, M64983 |
| AA200393 | CTP synthetase homolog | NM_019857 | NP_062831 | AK024070 |
| AA416325 | ATX1 (antioxidant protein 1) homolog 1 | NM_004045 | NP_004036 | U70660 |
| | (yeast) | | | |
| AA198703 | apoptotic protease activating factor 1 | NM_001160 | NP_001151 | AF013263 |
| AA457927 | polypeptide N- | NM_020474 | NP_065207 | U41514, Y10343 |
| | acetylgalactosaminyltransferase 1 | | | |

[0075] TABLE 2
ESTs

| | | | | |
|---|---|---|---|---|
| | | Genbank | | |
| Mouse gene name | Human mRNA | Source | Genbank | Description |

Cluster A

| no known gene | no homologene | | AA217294.1 | Public domain EST {IMAGE: 653016} |
|---|---|---|---|---|
| no known gene | no homologene | | W41083 | ESTs, Weakly similar to AF127035_1 |
| | | | | calcium-activated chloride channel |
| | | | | protein 2 [H. sapiens] |
| no known gene | no homologene | | AA137298 | ESTs |
| no known gene | no homologene | | AA268133 | ESTs |
| no known gene | no homologene | | AA027728.1 | Public domain EST {IMAGE: 463464} |
| no known gene | no homologene | | AA209551 | ESTs |
| no known gene | no homologene | | AA395994 | ESTs |
| tridadin | NM_006073 | U18985 | AA466026 | ESTs, Moderately similar to triadin |
| | | | | [H. sapiens] |
| no known gene | no homologene | | AA080287 | ESTs |
| extracellular link | NM_006691 | AF118101 | AA269330 | ESTs, Moderately similar to AF118108_1 |
| domain containing 1 | | | | lymphatic endothelium-specific hyaluronan |
| | | | | receptor LYVE-1 [H. sapiens] |
| no known gene | no homologene | | AI450674 | ESTs, Moderately similar to T20D3.3 |
| | | | | [C. elegans] |
| no known gene | no homologene | | AA290313 | ESTs |
| retinoblastoma- | NM_006101 | AF017790 | W99015 | ESTs, Moderately similar to |
| associated protein | | | | retinoblastoma-associated protein |
| HEC | | | | HEC [H. sapiens] |
| no known gene | no homologene | | AA288562.1 | Public domain EST {IMAGE: 749337} |
| no known gene | no homologene | | AI595209 | ESTs |
| RAP 1 GTPASE | NM_002885 | M64788 | AI509969 | ESTs, Highly similar to RAP1 GTPASE |
| activating protein 1 | | | | ACTIVATING PROTEIN 1 [Homo sapiens] |
| syaptotogmin 1 | MM_005639 | M55047 | W15872 | ESTs |
| cystaithionine gamma | NM_001902 | S52028 | AA245993 | ESTs, Highly similar to CYSTATHIONINE |
| lyase | | | | GAMMA-LYASE [Homo sapiens] |
| tocopherol alpha | NM_000370 | D49488 | AA277652 | ESTs |
| transfer protein | | | | |
| no known gene | no homologene | | AA061834 | ESTs |
| ectodermal neural | NM_003633 | AF059611 | AI608121 | ESTs, Weakly similar to open reading |
| cortex | | | | frame [M. musculus] |
| no known gene | no homologene | | AA145023 | ESTs |
| no known gene | no homologene | | AA414733 | ESTs |
| no known gene | no homologene | | AA259388 | ESTs |
| no known gene | NM_017779 | AK000361 | AA254513 | ESTs |

Cluster B

| no known gene | no homologene | | W09957 | ESTs, Moderately similar to unnamed |
|---|---|---|---|---|
| | | | | protein product [H. sapiens] |
| no known gene | no homologene | | W33467 | ESTs |
| myosin binding | NM_004533 | X73113 | AI385497 | ESTs, Moderately similar to C-PROTEIN, |
| protein C | | | | SKELETAL MUSCLE FAST-ISOFORM |
| | | | | [Gallus gallus] |
| Latenet transforming | NM_003573 | Y13622 | AA268327.1 | Public domain EST {IMAGE: 733726} |
| growth factor beta | | | | |
| binding protein 4 | | | | |
| aggrecan 1 | NM_001135 | M55172 | AA396306.1 | Public domain EST {IMAGE: 803275} |
| no known gene | no homologene | | AA066452 | ESTs, Weakly similar to A45910 ultra- |
| | | | | high-sulfur keratin - mouse [; |
| | | | | M. musculus] |
| human retinoic acid | NM_002888 | U27185 | AI464827 | ESTs, Weakly similar to TIG1_HUMAN |
| receptor responder | | | | RETINOIC ACID RECEPTOR RESPONDER |
| protein 1 | | | | PROTEIN 1 [H. sapiens] |
| no known gene | no homologene | | AA038095.1 | Public domain EST {IMAGE: 472860} |
| no known gene | no homologene | | AA038926 | ESTs |
| creatine kinase | NM_001825 | J05401 | AI322288 | ESTs, Highly similar to CREATINE KINASE, |
| | | | | SARCOMERIC MITOCHONDRIAL PRECURSOR |
| | | | | [Rattus norvegicus] |

Cluster C

| no known gene | NO HUMAN CDNA | | AA221886 | ESTs |
|---|---|---|---|---|
| TNFa induced | NO HUMAN CDNA | | AA272372 | ESTs, Weakly similar to match to ESTs |
| adipose-related | | | | AA316181 [H. sapiens] |
| protein | | | | |
| no known gene | NO HUMAN CDNA | | AA547022 | ESTs, Weakly similar to TIA1_MOUSE |
| | | | | NUCLEOLYSIN TIA-1 [M. musculus] |
| no known gene | MM_032947 | AF313413 | AA239554 | ESTs |
| no known gene | NM_015696 | AK027683 | W35981 | ESTs, Moderately similar to GLUTATHIONE |
| | | | | PEROXIDASE [Schistosoma mansoni] |
| no known gene | NM_030782 | BC025305 | AA020034 | ESTs, Weakly similar to cleft lip and |
| | | | | palate transmembrane protein 1 [H. |
| | | | | sapiens] |
| no known gene | NO HUMAN CDNA | | AI530458 | ESTs, Moderately similar to unnamed |
| | | | | protein product [H. sapiens] |
| no known gene | NM_015242 | AY049732 | AA268881 | ESTs, Highly similar to KIAA0782 |
| | | | | protein [H. sapiens] |
| no known gene | NO HUMAN CDNA | | AA030366 | ESTs |
| sorting nexin 10 | NM_013322 | BC031050, | AA260397 | ESTs, Weakly similar to SDP8 |
| | | BC147978 | | [M. musculus] |
| FLJ13433 | NM_022496 | AK023495 | AA184337 | ESTs, Weakly similar to ACTZ_HUMAN |
| | | | | ALPHA-CENTRACTIN [M. musculus] |
| no known gene | no homologene | | AA537509.1 | Public domain EST {IMAGE: 949810} |
| no known gene | no homologene | | AA388607 | ESTs |
| no known gene | no homologene | | W09604 | ESTs, Highly similar to large I antigen- |
| | | | | forming beta-1,6-N-acetylglucosaminyl- |
| | | | | transferase [M. musculus] |
| no known gene | no homologene | | W83671 | ESTs, Weakly similar to proteolipid |
| | | | | protein 2 [M. musculus] |
| major vault protein | NM_005115, | AJ238510, | AA200827 | ESTs, Moderately similar to I53908 |
| | NM_017458 | AJ23519, | | major vault protein - rat |
| | | X79882 | | [R. norvegicus] |
| no known gene | no homologene | | W08116 | ESTs, Moderately similar to WDNM1 |
| | | | | PROTEIN [Rattus norvegicus] |
| no known gene | no homologene | | AA204090 | ESTs, Weakly similar to AF201951_1 |
| | | | | high affinity immunoglobulin epsilon |
| | | | | receptor beta subunit [H. sapiens] |
| no known gene | no homologene | | AA098237 | ESTs |
| MDS006: X006 | NM_020233 | BC001294 | AA138584 | ESTs |
| protein | | | | |
| VMP1: likely | NM_030938 | AF14006 | AA516913 | ESTs, Weakly similar to CG1534 gene |
| ortholog of rat | | | | product [D. melanogaster] |
| vacuole membrane | | | | |
| protein 2 | | | | |
| Hepcidin | NM_021175 | AJ277280 | W12913 | ESTs, Moderately similar to HEPC_HUMAN |
| antimicrobial peptide | | | | ANTIMICROBIAL PEPTIDE HEPCIDIN |
| | | | | PRECURSOR [H. sapiens] |
| transmembrane 7 | NM_003272 | AF027826 | AA189999 | DNA segment, Chr 13, Abbott 1 expressed |
| superfamily member | | | | |
| 1 | | | | |
| no known gene | no homologene | | AA122848 | ESTs |
| mitogen-activated | NM_145342, | AB018276, | W82121 | ESTs, Weakly similar to scaffold |
| protein kinase kinase | NM_015093 | AL117407 | | attachment factor B [R. norvegicus] |
| kinase 7 interacting | | | | |
| protein 2 | | | | |
| no known gene | no homologene | | AA261222 | ESTs |
| glycine | NM_001482 | S68805 | AA185055 | ESTs, Highly similar to GATM_RAT GLYCINE |
| amidinotransferase | | | | AMIDINOTRANSFERASE PRECURSOR |
| | | | | [R. norvegicus] |
| phosphoinositide-3- | NM_014308 | AF128881 | AA290057 | ESTs |
| kinase | | | | |
| no known gene | no homologene | | AA210357 | ESTs |
| FLJ20401 | NM_017805 | AK000408 | AI391280 | ESTs, Highly similar to unnamed protein |
| | | | | product [H. sapiens] |
| no known gene | no homologene | | AA178549 | ESTs |
| no known gene | no homologene | | W11587 | ESTs, Moderately similar to SARL_HUMAN |
| | | | | SARCOLIPIN [H. sapiens] |
| no known gene | no homologene | | AA163875 | ESTs |
| no known gene | no homologene | | AI595493 | ESTs, Weakly similar to AF161080_1 |
| | | | | inhibitory receptor PILRalpha |
| | | | | [H. sapiens] |
| KIAA0475 | NM_014864 | AB007944 | AA210038 | ESTs |
| no known gene | no homologene | | AA268055 | ESTs |
| FLJ22833 | NM_022837 | AK026486 | AA175979 | ESTs, Weakly similar to CG5181 gene |
| | | | | product [D. melanogaster] |
| placenta-specific 8 | NM_016619 | AF208846 | AA245029 | DNA segment, Chr 5, Wayne State |
| | | | | University 111, expressed |
| Z39IG: Ig | NM_007268 | AJ32502 | AA261076.1 | Public domain EST {IMAGE: 720457} |
| superfamily protein | | | | |

Cluster D

| no known gene | MM_05133 | AE006639 | W14214 | ESTs |
|---|---|---|---|---|
| procollagen, type V, | NM_000393 | BC015705, | AA138290 | ESTs |
| alpha 2 | | M58529, | | |
| | | Y14690 | | |
| solute carrier family | NM_004955 | U81375 | AI451844 | ESTs, Highly similar to AF131212_1 |
| 29, member 1 | | | | equilibrative nitrobenzylthioinosine- |
| | | | | sensitive nucleoside transporter ENT1 |
| | | | | [M. musculus] |
| no known gene | NO HUMAN CDNA | | W99891 | ESTs |
| solute carrier family | NM_004955 | U81375 | AA397253 | ESTs, Highly similar to AF131212_1 |
| 29, member 1 | | | | equilibrative nitrobenzylthioinosine- |
| | | | | sensitive nucleoside transporter ENT1 |
| | | | | [M. musculus] |
| no known gene | NO HUMAN CDNA | | W29300.1 | Public domain EST {IMAGE: 337567} |
| no known gene | NM_001908 | AK092070 | W41810 | ESTs, Weakly similar to T17344 |
| | | | | hypothetical protein DKFZp586L2024.1 - |
| | | | | human [H. sapiens] |
| twisted gastulation | NM_020648 | BC020490 | AA267373 | ESTs |
| protein | | | | |
| adenosine deaminase | NM_001112 | U76420 | W16053 | ESTs |
| RNA specific B1 | | | | |
| no known gene | NM_015429 | AB056106 | AA267567 | ESTs |
| oxoglutarate | NM_002541 | D10523 | W13320 | ESTs, Highly similar to 2-OXOGLUTARATE |
| dehydrogenase | | | | DEHYDROGENASE E1 COMPONENT PRECURSOR |
| | | | | [Homo sapiens] |
| no known gene | NM_016308 | AF070416 | AI594925 | ESTs, Highly similar to URIDYLATE KINASE |
| | | | | [Saccharomyces cerevisiae] |
| Mrps18b | NM_041046 | AF100761 | AI426268 | ESTs, Moderately similar to PTD017 |
| | | | | [H. sapiens] |

| | | | |
|---|---|---|---|
| no known gene | NO HUMAN CDNA | AA185432 | ESTs |
| no known gene | NO HUMAN CDNA | AA461746 | ESTs |

Cluster E

| no known gene | AA146022, | | AA146022 | ESTs |
|---|---|---|---|---|
| | AK026169 | | | |
| no known gene | NM_003505 | AB017363 | AI604159 | ESTs |
| no known gene | NO HUMAN CDNA | | W14925 | ESTs, Moderately similar to KIAA1029 |
| | | | | protein [H. sapiens] |
| no known gene | NM_014864 | AB007944 | AA274981 | ESTs |
| no known gene | NO HUMAN CDNA | | AA033308 | ESTs |
| N4wbp-4 pending | NM_020182 | AF305616 | AA144094 | ESTs, Highly similar to dJ718J7.1 |
| | | | | [H. sapiens] |
| filamin like protein | AI678681 | | AA466198 | ESTs, Highly similar to ENDOTHELIAL |
| | | | | ACTIN-BINDING PROTEIN [Homo sapiens] |
| no known gene | NM_004518 | Y15065 | W11395 | ESTs |
| secreted modular | NM_022138 | AB014737 | AA272826 | ESTs, Weakly similar to AF070470_1 |
| binding protein 2 | | | | SPARC-related protein [M. musculus] |
| no known gene | NM_007080 | AJ238098 | W09867 | ESTs, Moderately similar to HYPOTHETICAL |
| | | | | 9.3 KD PROTEIN ZK652.1 IN CHROMOSOME III |
| | | | | [Caenorhabditis elegans] |
| no known gene | NO HUMAN CDNA | | AA274099 | ESTs, Weakly similar to ZEP-kinase |
| | | | | [M. musculus] |
| no known gene | NM_017510 | BC001123 | AA517431 | ESTs, Moderately similar to GLYCOPROTEIN |
| | | | | 25L PRECURSOR [Canis familiaris] |
| no known gene | AL832340, | | AA386758 | ESTs |
| | AL833405 | | | |
| no known gene | NO HUMAN CDNA | | AA217009 | ESTs |
| transforming growth | NM_006022 | AJ222700 | AA060863.1 | Public domain EST {IMAGE: 482995} |
| factor beta 1 induced | | | | |
| transcript 4 | | | | |
| no known gene | NM_004265 | AF084559 | AA068575 | ESTs, Weakly similar to delta-6 fatty |
| | | | | acid desaturase [M. musculus] |
| cathepsin Z | NM_001336 | AF136273 | W14289 | DNA segment, Chr 2, Wayne State University |
| | | | | 143, expressed |
| janus kinase 1 | NM_002227 | M64174 | W29699 | ESTs, Highly similar to TYROSINE-PROTEIN |
| | | | | KINASE JAK1 [Homo sapiens] |
| no known gene | NO HUMAN CDNA | | W82178 | DNA segment, Chr 7, Wayne State University |
| | | | | 86, expressed |
| no known gene | NM_032849 | AK055635 | AA024250 | ESTs |
| no known gene | NO HUMAN CDNA | | AA002801.1 | Public domain EST {IMAGE: 426240} |
| no known gene | NM_001478 | L76079, | AA268669 | ESTs, Weakly similar to AF232669_1 |
| | | M83651 | | Kalirin-12a [R. norvegicus] |
| ATP binding cassette, | NM_005502 | AF165281, | AA203809 | ESTs |
| subfamily A (ABC1), | | AF275948 | | |
| member 1 | | | | |
| no known gene | NO HUMAN CDNA | | W36470 | ESTs, Weakly similar to T00343 |
| | | | | hypothetical protein KIAA0584 - |
| | | | | human [H. sapiens] |
| no known gene | NO HUMAN CDNA | | AA050516 | DNA segment, Chr 9, Wayne State University |
| | | | | 18, expressed |
| no known gene | NO HUMAN CDNA | | AI426270 | ESTs, Weakly similar to nuclear protein |
| | | | | np95 [M. musculus] |
| no known gene | NM_002358 | U31278 | AA466530 | ESTs, Moderately similar to KIAA0280 |
| | | | | [H. sapiens] |
| no known gene | NM_022763 | AK027052 | AA265864 | ESTs |
| golgi SNAP receptor | NM_004287, | AF007548, | AA002301 | ESTs |
| complex member 2 | NM_054022 | AF229796 | | |
| no known gene | NM_003387 | AF031588, | AA174503 | ESTs |
| | | AF106062 | | |
| lectin, mannose- | NM_005570 | U09716, | AA036111 | ESTs, Highly similar to ERGIC-53 PROTEIN |
| binding, 1 | | X71661 | | PRECURSOR [Homo sapiens] |
| ribosome binding | NM_004587 | AF006751 | AA002385 | ESTs, Moderately similar to KIAA1398 |
| protein 1 | | | | protein [H. sapiens] |
| no known gene | NO HUMAN CDNA | | AA139063 | ESTs, Moderately similar to KIAA0007 |
| | | | | [H. sapiens] |
| no known gene | NO HUMAN CDNA | | AA189695 | ESTs, Highly similar to TROPOMYOSIN 4, |
| | | | | EMBRYONIC FIBROBLAST ISOFORM |
| | | | | [Rattus norvegicus] |
| no known gene | NO HUMAN CDNA | | AI449320 | ESTs |
| quiescin Q6 | NM_002826 | U97276 | AA024091 | ESTs, Moderately similar to quiescin |
| | | | | [H. sapiens] |
| no known gene | NM_019026 | AB020980 | AA472933 | ESTs, Highly similar to unknown |
| | | | | [H. sapiens] |
| no known gene | NO HUMAN CDNA | | AA048837 | ESTs, Highly similar to INTERFERON- |
| | | | | INDUCIBLE PROTEIN [Rattus norvegicus] |
| no known gene | NO HUMAN CDNA | | AA239252 | ESTs |
| golgi reassembly | NO HUMAN CDNA | | AA213185 | ESTs, Weakly similar to AF218940_1 |
| stacking protein 2 | | | | formin-2 [M. musculus] |
| no known gene | NM_020123 | AF160213 | AA144167 | ESTs, Highly similar to unnamed protein |
| | | | | product [H. sapiens] |
| neuropilin 2 | NM_003872 | AF022860 | AA269699 | ESTs |
| no known gene | NO HUMAN CDNA | | AA217196 | ESTs |
| no known gene | NO HUMAN CDNA | | AA432472.1 | Public domain EST {IMAGE: 833346} |
| calreticulin | NO HUMAN CDNA | | W33774.1 | Public domain EST {IMAGE: 352406} |
| no known gene | NO HUMAN CDNA | | AA177584.1 | Public domain EST {IMAGE: 621742} |
| no known gene | NM_020820 | AJ320261 | W82294 | ESTs |
| no known gene | NM_018446 | AF157318 | AA210344 | ESTs, Highly similar to AF157318_1 |
| | | | | AD-017 protein [H. sapiens] |
| lectin, mannose- | NM_005570 | U09716, | AA244713 | ESTs, Highly similar to ERGIC-53 PROTEIN |
| binding, 1 | | X71661 | | PRECURSOR [Homo sapiens] |
| no known gene | NO HUMAN CDNA | | AA437983 | ESTs, Weakly similar to AF151373_1 |
| | | | | nucleolin-related protein NRP |
| | | | | [R. norvegicus] |
| no known gene | NM_001643 | BC007309 | AA404092 | ESTs, Moderately similar to COATOMER |
| | | | | DELTA SUBUNIT [Homo sapiens] |
| tripartite motif | NM_030912 | AF281046 | AA027381 | ESTs, Weakly similar to I49642 estrogen- |
| protein 8 | | | | responsive finger protein - mouse |
| | | | | [M. musculus] |
| no known gene | NM_014604 | AF028823 | AI893697 | ESTs, Highly similar to HYPOTHETICAL |
| | | | | 13.5 KD PROTEIN C45G9.7 IN CHROMOSOME |
| | | | | III [Caenorhabditis elegans] |
| no known gene | NO HUMAN CDNA | | AA265636 | ESTs, Highly similar to CALDESMON, |
| | | | | SMOOTH MUSCLE [Gallus gallus] |
| no known gene | NO HUMAN CDNA | | AA536838 | ESTs |
| filamin like protein | AI678681 | | AA003323 | ESTs, Highly similar to ENDOTHELIAL |
| | | | | ACTIN-BINDING PROTEIN [Homo sapiens] |
| no known gene | NM_020790 | AF201945 | W14353 | ESTs, Weakly similar to trabecular |
| | | | | meshwork-induced glucocorticoid |
| | | | | response protein [M. musculus] |
| no known gene | NO HUMAN CDNA | | AA260155 | DNA segment, Chr 2, Wayne State University |
| | | | | 127, expressed |
| platelet-derived | NM_006207 | D37965 | AA030377 | ESTs, Highly similar to PDGF receptor |
| growth factor | | | | beta-like tumor suppressor |
| receptor-like | | | | [H. sapiens] |
| no known gene | NM_014933 | AB018358 | AA544844 | ESTs, Moderately similar to T14150 |
| | | | | vesicle associated protein 1 - rat |
| | | | | [R. norvegicus] |
| no known gene | NO HUMAN CDNA | | W10776.1 | Public domain EST {IMAGE: 314509} |
| no known gene | NM_032849 | AK055635 | AI552496 | ESTs |
| no known gene | NM_004394 | X76105 | AA269524 | ESTs, Highly similar to DAP1_HUMAN |
| | | | | DEATH-ASSOCIATED PROTEIN 1 |
| | | | | [H. sapiens] |
| no known gene | NO HUMAN CDNA | | W97172 | DNA segment, Chr 13, Wayne State University |
| | | | | 115, expressed |
| no known gene | NM_012426 | D87686 | AA269584 | ESTs, Highly similar to KIAA0017 protein |
| | | | | [H. sapiens] |
| enolase 1, alpha non | NM_001428 | X16287 | AA204262 | ESTs, Highly similar to ALPHA ENOLASE |
| neuron | | | | [Mus musculus] |

| | | | |
|---|---|---|---|
| no known gene | NO HUMAN CDNA | AA172597 | ESTs |
| no known gene | NO HUMAN CDNA | AA237920 | ESTs |

[0076] TABLE 3
Characteristics of Clusters A through E

| Cluster | Early | Late |
|---|---|---|
| A | ↓ | ↓ |
| B | — | ↑ |
| C | ↑ | — |
| D | ↑ | ↑↑ |
| E | ↑ | ↑ |

↓ = gene expressed reduced at least 2 fold.
↑ = gene expression increased at least 2 fold.
↑↑ = gene expression increased more than 2 fold.

### Example 3

### Confirmation of Microarray Data by RT-PCR and In Situ Hybridization

[0077] Confirmation of the microarray data was performed by measuring the expression level of genes in two individual paws at each time point using real time RT-PCR and in situ hybridization.

[0078] Real time reverse transcription (RT) PCR analysis was performed as follows: to remove possible genomic DNA contamination, total paw RNA was treated with amplification grade DNAse I (Gibco Life Technologies, Rockville, Md.). RNA was then subjected to reverse transcription using SUPERSCRIPT Preamplification System for First Strand cDNA Synthesis (Gibco Life Technologies). Serial dilutions of the cDNA template were prepared and PCR was carried out using a Lightcycler System (Roche Molecular Biochemicals, Palo Alto, Calif.). After each elongation phase, the fluorescence of SYBR Green I, which binds double-stranded DNA was measured. Reactions (20 μl) were performed in microcapillary tubes using 5 μl of diluted cDNA with SYBR Green I (Roche Molecular Biochemicals), master mix, upstream and downstream primers and MgCl₂. Sequences of primer pairs were as follows: Follistatin-like, upstream: 5′-GGA TTG AGA ATC AGC ACT GGG-3′ (SEQ ID NO:386); downstream: 5′-TTG AAA GGG AGG GCA CAG AAC-3′ (SEQ ID NO:387); IL-2Rα, upstream: 5′-CGG AAG CCT GAA CAT CAA TCC-3′ (SEQ ID NO:388); downstream: 5′-GCC ACT AAC CCC AAC TCT TAT GAG-3′ (SEQ ID NO:389); GAPDH, upstream: 5′-ACC ACA GTC CAT GCC ATC AC-3′ (SEQ ID NO:390); downstream: 5′-TCC ACC ACC CTG TTG CTG TA-3′ (SEQ ID NO:391). Reactions containing water or cDNA synthesized without reverse transcriptase, as template, resulted in no PCR products. Dilutions of cDNA synthesized from early paw RNA were predicted to have the highest expression of the gene product being amplified and, thus, were used as the concentration standards. Lightcycler quantification software v3 was used to compare amplification in experimental samples during the log-linear phase to the standard curve from the dilution series of acute tissue. All experimental samples were normalized to GAPDH (glyceraldehyde-3-phosphate dehydrogenase) expression levels for that tissue. Expression levels of each gene were plotted relative to the levels in normal tissue.

[0079] In situ hybridization analysis was performed as previously described (Witte, et al. Am J. Pathol 1991;139:717-724). Briefly, ten micron cryostat sections of snap frozen tissue were air dried on TESPA coated Superfrost Plus (Histology Control Systems, Glenhead, N.Y.) slides and post-fixed in 4% (w/v) paraformaldehyde in PBS then acetylated with acetic anhydride as described. Paws were fixed for 48 hours in 4% (w/v) paraformaldehyde (Electron Microscopy Sciences, Ft. Washington, Pa.) in PBS at 4° C. immediately after harvesting. Following fixation, the tissue was decalcified in TBD-2 (Shandon, Pittsburgh, Pa.). Complete decalcification of the tissue was determined using 5% ammonium oxalate. Following decalcification the tissue was rinsed for ten minutes in running water and placed in 30% sucrose in PBS for 24 hours at 4° C. The samples were embedded in M-1 mounting media (Shandon), frozen in liquid nitrogen and stored at −80° C. Hybridizations were done overnight at 45° C. under a sealed coverslip. Following hybridization, the sections were treated with RNAse to remove unbound probe and the slides were washed extensively under highly stringent conditions. The slides were developed in Kodak D19 developer (Rochester, N.Y.). Sections were counterstained with hematoxylin & eosin and photographed using both dark- and bright-field illumination.

[0080] Mouse sense and antisense RNA probes were synthesized using the RNA Transcription Kit (Stratagene, La Jolla, Calif.). T3 or T7 RNA polymerase produced ³⁵S-radiolabeled antisense or sense single-stranded RNA probes, respectively. A sense probe generated from an unrelated mouse gene was used as a negative control for in situ hybridization.

[0081] Although none of the genes previously demonstrated to be upregulated by RPA were present on the microarray chip, two genes on the DNA microarray were related to genes whose expression patterns we have previously analyzed by RPA. One of the genes, IL-2Rγ, had a similar expression pattern to the previously observed expression pattern of IL-2. Another gene, follistatin-like, which is induced by TGFβ, had a similar expression pattern to the previously observed expression patterns of TGFβ 1, 2 and 3. Comparison of the expression of follistatin-like and IL-2Rγ by microarray and real time RT-PCR revealed similar patterns of expression (FIG. 2). In addition, spatial expression of IL-2Rγ was analyzed by in situ hybridization (FIG. 3). The expression pattern matched that observed in the DNA microarray hybridizations. IL-2Rγ was expressed in the inflammatory tissue surrounding the joint and in the periosteal tissue along the length of the bone.

### Example 4

### Classification of Differentially Expressed Genes

[0082] Of the 385 genes that were found to be differentially expressed during CIA in the mouse paw, 102 were expressed sequence tags (ESTs) and preferred members of this group represent novel genes critical to the pathology of CIA. Excluding duplicate gene spotting on the chip, 240 of the 385 gene sequences are annotated genes. Information on their expression in various tissues was obtained using LocusLink and Unigene at the National Center for Biotechnology Information (NCBI) website (ncbi.nlm.nih.gov/). These genes have been reported in a variety of tissues, including but not limited to bone, brain, colon, liver, lung, kidney, mammary, skin, spleen and testis. Not surprisingly, the majority are expressed in the lymphoid organs, including spleen and lymph nodes (FIG. 4).

[0083] To further characterize the annotated genes, they were grouped into categories using Incyte's Function and Pathways categorization (FIG. 5). The largest functional categories included immunity and defense (47 genes), protein metabolism (36 genes), lipid metabolism (11 genes) and differentiation and proliferation (11 genes). The largest pathways categories included membrane (59 genes), secreted and extracellular (59 genes), organelle (24 genes), intracellular signaling (17 genes), receptors (17 genes), proteases (15 genes) and antigen recognition (14 genes). In most cases, the genes in each category were distributed proportionally to the size of the clusters identified in FIG. 1.

[0084] The 240 previously characterized genes that were differentially regulated during CIA were analyzed through extensive literature searches. Of these 240 genes, a number of genes that have not previously been characterized in autoimmune arthritis but that could potentially be involved, were identified. From the literature searches on these particular genes, a number of genes were found to be associated with three basic biological functions. These genes, as well as their temporal expression, are listed in Table 4.

TABLE 4
Genes novel to arthritis

| | |
|---|---|
| Early | Late |

Proliferation, differentiation and tumorigenesis

| | | |
|---|---|---|
| enolase 3, β muscle | | * |
| tumor-associated calcium signal transducer 2 | | * |
| S100 calcium binding protein A3 | | * |
| angiopoietin related protein 2 | | * |
| β-1,4 N acetylgalactosaminyltransferase | * | * |
| polypeptide N-acetylgalactosaminyltransferase 1 | * | * |
| endomucin | * | * |
| growth factor receptor bound protein 10 | * | * |
| growth arrest and DNA-damage-inducible, γ | * | * |
| dickkopf homolog 3 (Xenopus laevis) | * | * |
| CDC28 protein kinase 1 | * | |
| a disintegrin and metalloproteinase domain 9 | * | |
| ecotropic viral integration site 2 | * | |
| selenoprotein P | * | |
| proprotein convertase subtilisin/kexin type 5 | * | |
| B-cell leukemia/lymphoma 3 | * | |

Apoptosis

| | | |
|---|---|---|
| apoptotic protease activating factor 1 | * | * |
| regulator of G-protein signaling 5 | * | * |
| calumenin | * | * |
| CD97 | * | * |
| calpain 6 | * | * |
| caspase 11 | * | * |
| receptor interacting protein | * | * |
| transglutaminase 2, C polypeptide | * | * |
| CD44 | * | * |
| CD53 | * | |
| fibrinogen/angiopoietin-related protein | * | |
| baculoviral IAP repeat-containing 2 | * | |
| uncoupling protein 2, mitochondrial | * | |

Inflammation

| | | |
|---|---|---|
| annexin A2 | * | * |
| annexin A4 | * | * |
| annexin A6 | * | * |
| lysosomal membrane glycoprotein 1 | * | * |
| protocadherin 13 | * | * |
| catenin beta | * | * |
| pentaxin related gene | * | |
| small proline-rich protein 2A | * | |
| small inducible cytokine subfamily B (Cys-X-Cys) | * | |
| colony stimulating factor 2 receptor, | * | |
| β 2, low-affinity | | |
| CD37 | * | |
| type II transmembrane protein | * | |
| BP-3 alloantigen | * | |
| Mus musculus hypoxia induced gene 2 (Hig2) | * | |

[0085] The present study quantitatively analyzed coordinated gene expression on a global scale from paws of mice with CIA to identify novel genes involved in arthritis as well as to identify gene expression patterns that differ between early and late synovitis in this model system. Genes known to be upregulated in CIA or RA were confirmed by the analysis. However, most of the differentially-expressed genes identified by the microarray have not been previously described in arthritis.

[0086] The difference in expression profiles observed between early and late disease has not previously been fully-appreciated. Even though the microarray analysis was limited to two time points over the course of the disease, cluster analysis grouped the 385 genes according to their mRNA expression in early versus late disease. In some embodiments, the hierarchical clusters can represent coordinately expressed genes, the effects of cell phenotype and/or a combination of the two. Confirmation of the validity of the microarray expression analysis includes RT-PCR analysis of expression of follistatin-like gene and IL-2Rγ, as well as analysis of the spatial expression of IL-2Rγ by in situ hybridization. Of 385 genes on the microarray found to be differentially expressed in CIA, 240 have been previously annotated. These 240 genes can be divided into several biological functions and pathways; however, none of the clusters were over-represented in any of these categories.

[0087] Included in the group of annotated genes are many that have previously been demonstrated to be upregulated in RA, including TIMP-3, β-2 microglobulin, biglycan, lumican, insulin-like growth factor binding protein 5 and stromal cell derived factor-1, as well as proinflammatory genes such as IL-2Rγ, small inducible cytokine A12 and A4 (MCP5 and MIP1β respectively), CCR5, macrophage expressed gene 1, cathepsins C and S, CD14 and fibronectin. Expression of a majority of these 240 genes also occurs in lymphoid organs, which is expected since the synovial inflammation is dominated by immune cells.

[0088] The 240 annotated genes were analyzed through extensive review of the literature, resulting in a list of 43 genes not previously characterized in autoimmune arthritis. Based on their known biological functions these genes might play central roles in the pathophysiology of the disease. These genes, as well as their temporal expression, are listed in Table 4. Several interesting comparisons can be made between the biological function of these genes, their temporal expression patterns, and the histopathologic appearance of arthritis.

### Example 5

### Genes Expressed Throughout CIA

[0089] Several genes involved in cell proliferation, differentiation and tumorigenesis were upregulated throughout the disease (clusters D and E). These included β-1,4 N-acetylgalactosaminyltransferase and polypeptide N-acetylgalactosaminyltransferase 1, that are involved in the synthesis of gangliosides, whose overexpression is associated with a marked increase in growth rate and invasive activity.

[0090] Numerous genes involved in apoptosis were identified that were expressed both in early and late disease. Cellular turnover in normal tissues is tightly regulated through a balance of cell proliferation and cell death. The regulation of cell populations within the joint is very likely also controlled by apoptotic processes. Apoptosis of cells within the arthritic joint has been proposed to be a source of self-peptides that could generate auto-antigens that may propagate inflammation. One of these, CD44, has been postulated to play a role in the elimination of neutrophils from sites of inflammation in inflammatory kidney disease and its upregulation on the surface of chondrocytes may contribute to cartilage degeneration in RA patients. Other genes include calpain 6 and caspase 11, which are members of two families of cysteine proteases involved in the regulation of pathological cell death. Additionally, receptor interacting protein (RIP) interacts with Fas, causing morphological changes in cells that resemble apoptosis.

[0091] Inflammatory processes occur both early and late in disease. Therefore, the identification of genes involved with inflammation was not unexpected; however, various genes were identified that had not previously been associated with inflammation in CIA or RA. These genes include annexins A2, A4 and A6, which affect the activation and migration of macrophages. The human homologue of lysosomal membrane glycoprotein 1, h-LAMP1, is detectable in patients with scleroderma and systemic lupus erythematosus and may contribute to the migration of activated leukocytes to the sites of inflammation. Catenin-β, when complexed with E-cadherin, is upregulated in gut inflammation of patients with spondyloarthropathy.

### Example 6

### Genes Expressed in Late CIA

[0092] Late CIA is characterized by an increase in fibrosis. Fibroblasts taken from RA patients with chronic disease are in a constitutive state of activation and exhibit plasticity in cell growth. Of the eight annotated genes that are selectively upregulated in late disease listed in cluster B of Table 1, four are involved in cell proliferation, differentiation and tumorigenesis and may play a role in the chronic activation of fibroblasts at late stages of disease. Specifically, tumor associated calcium signal transducer 2 is expressed early in tumorigenesis, and angiopoietin related protein 2 is associated with endothelial cell development and tumorigenesis.

### Example 7

### Genes Expressed in Early CIA

[0093] Several genes involved in cell proliferation, differentiation and tumorigenesis are selectively upregulated in early disease and are listed in cluster C of Table 1. CDC28 kinase binds to the catalytic subunit of cyclin dependent kinases and may be associated with dysregulation of lymphocyte cell cycle control in HIV infected patients. ADAM9, a disintegrin and metalloproteinase domain 9, binds MAD2beta, which is involved in cell cycle control.

[0094] Three apoptosis genes that are selectively upregulated in early CIA have anti-apoptotic properties. These include CD53, fibrinogen/angiopoietin related protein and baculoviral IAP repeat containing 2. The latter two are involved in endothelial cell survival. The upregulation of genes involved in endothelial cell survival, particularly early in disease, may allow for migration of inflammatory cells into the diseased joint.

[0095] Genes selectively upregulated in early arthritis (cluster C) include many inflammatory genes previously associated with CIA or RA. In addition, numerous other potentially pro-inflammatory genes are in this category. Pentaxin-related gene is involved in inflammatory reactions, particularly those of the vessel wall. Small inducible cytokine B subfamily member 13 (CXCL13) is a chemokine for B lymphocytes. Type II transmembrane protein is expressed exclusively in macrophages and monocytes and is involved in activation of myeloid cells. Hypoxia induced gene 2 (interleukin-20) is modulated by hypoxia and may have a role in inflammation, possibly in attempting to re-establish homeostasis.

### Example 8

### Genes that are Down-Regulated

[0096] Although most of the differentially-expressed genes were upregulated during CIA, all the genes in cluster A of Table 1 were downregulated, compared to normal paws. This represents a group of potentially important genes, as their downregulation may contribute to the loss of homeostasis in the joint and the failure to limit the inflammatory process. One annotated gene in cluster A, cytochrome P450, has previously been shown to be downregulated in inflammation and certain alleles of cytochrome P450, which are inactive or poor metabolizers, show a modest association with susceptibility to ankylosing spondylitis, but not RA. Most of the genes in cluster A are ESTs, and their further characterization will be of interest. In addition to the 25 ESTs in cluster A, the further characterization of the other 132 ESTs identified in this study will provide information about the gene regulatory network(s) involved in the autoimmune arthritic process.

[0097] In summary, the present study utilized DNA microarray technology to analyze coordinated gene expression in paws of mice with early and late CIA. This analysis has revealed a large number of genes previously not known to be involved in arthritis, as well as distinct gene expression profiles that differentiate between early and late CIA. Further characterization of these genes and pathways will advance the understanding of the basic mechanisms responsible for initiation and persistence of synovitis and may aid in the development of novel therapies.

### Example 9

### Isolation of Full-Length Genes Identified by ESTs

[0098] The 157 expressed sequence tags (ESTs) are used to identify the full-length genes associated with them. The EST sequences are used to search public and proprietary computer databases. Those that are not identified in the databases, are used to screen mouse libraries for full-length cDNA clones using methods known to one of skill in the art.

### Example 10

### Identification of Human Homologs and Production of a Human Microarray

[0099] Human homologs are identified by searching databases to find the closest human homolog for each of the 385 mouse genes identified herein. Many of the human homologs are known. Those that do not possess a homolog in the databases are identified by screening a human cDNA library using a mouse probe. In particular, when active regions or highly conserved regions of the mouse protein are known, these are used to screen the library. For example, kinases are known to contain regions that are highly conserved. Thus, if the mouse gene codes for a kinase, these regions are included within the probe. Alternatively, or in addition, a degenerate mouse probe is produced, with the degeneracy in regions that are less likely to possess high homology, for example, a degenerate probe for a kinase is constructed to have more degeneracy around the kinase region.

### Example 11

### mRNA Expression Profiling of Early and Late Rheumatoid Arthritis in Humans

[0100] Differential gene expression in the synovial tissue of humans with rheumatoid arthritis was analyzed and compared to that of synovial tissue from normal humans.

[0101] RNA was isolated from a human synovial biopsy and quick frozen in liquid nitrogen for storage at −80° C. Frozen synovial tissue was minced with a scalpel and homogenized with a Polytron Tissue Tearor (Biospec Products, Bartlesville, Okla.) in appropriate volumes of RNA Stat-60 (Tel-Test, Friendswood, Tex.). Total RNA was extracted from the tissue homogenates according to the manufacturer's instructions. Pooled total RNA from normal synovial biopsy samples, mild arthritic synovial biopsy samples and severe arthritic synovial biopsy samples was used to isolate polyA+ RNA using the Oligotex mRNA isolation kit (Qiagen, Valencia, Calif.) according to the manufacturer's instructions. RNA concentrations were measured by fluorometry using the Ribogreen RNA Quantification Kit (Molecular Probes, Inc., Eugene, Oreg.).

[0102] DNA microarray analysis was performed as follows: mRNA from a human without RA was used for normalization of gene expression levels across all microarray chips. Competitive hybridizations with Cy3 labeled normal human mRNA versus Cy5 labeled mild RA mRNA or Cy5 labeled severe RA mRNA were performed. Each sample (normal, mild and severe) was labeled and hybridized to the GeneChip® Human Genome U95 Set from Affymetrix (Santa Clara, Calif.) which represents about 60,000 full-length genes and EST clusters.

[0103] Primary data is examined using Incyte Gemtools software and GeneSpring version 4.0.4 software (Silicon Genetics, Redwood City, Calif.). Defective cDNA spots (irregular geometry, scratched, or <40% area compared to average) or spot fluorescence hybridizations with signal to noise ratios less than 2.5:1 are eliminated from the data set. Data sets are subjected to normalization first within each microarray experiment such that the median of the Cy5 channel was balanced against the ratio of the Cy3 channel (k*(MedianCy3)=MedianCy5, where k is the ratio of the median intensities in each). Each microarray contained 192 control genes present as non-mammalian single gene “spikes” or “complex targets”. The complex targets consist of probe-sets that contain a pool of cellular genes expressed in most cell types. In addition, each experimental mRNA sample was augmented with incremental amounts of non-mammalian gene RNA (2×, 4×, 16×, etc) to permit assessment of the dynamic range attained within each microarray. Little variation was observed across the microarray series with respect to the control genes (not shown), providing support for inter-array comparisons of temporally regulated genes. Genes were clustered according to their expression pattern by subjecting the log-transformed data (R=log₂Cy5/(kCy3), where R is the log of the expression ratio for each gene) to the hierarchical tree clustering algorithm as implemented in the GeneSpring program (Silicon Genetics). The hierarchical tree analysis was performed using a minimum distance value of 0.001, separation ratio of 0.5 and the standard correlation distance definition.

[0104] Human sense and antisense RNA probes were synthesized using the RNA Transcription Kit (Stratagene, La Jolla, Calif.). T3 or T7 RNA polymerase produced ³⁵S-radiolabeled antisense or sense single-stranded RNA probes, respectively. A sense probe generated from an unrelated human gene was used as a negative control for in situ hybridization.

[0105] For mild and severe disease, mRNA from patients with severe arthritis (score of 4) were used to generate probes that are hybridized to the GeneChip® Human Genome U95 Set from Affymetrix (Santa Clara, Calif.) which represents about 60,000 full-length genes and EST clusters, as is mRNA from normal human synovial tissue. Hybridizations are conducted on duplicate chips, allowing for the elimination of genes whose expression levels differed by greater than 50% between the duplicate samples. About 60,000 genes and ESTs are represented in the Set.

[0106] The method above seeks to identify all genes that are differentially expressed in human arthritis using a variety of microarrays or DNA chips. Using the information identified in Examples 9-11 a “human Rheumatoid Arthritis genechip” is produced.

### Example 12

### Method for the Production of a “Human Rheumatoid Arthritis Genechip”

[0107] The genes that are found to be differentially expressed in Examples 9-11 are used to produce a “human Rheumatoid Arthritis genechip.” This chip will be used for the diagnosis, prognosis, and treatment of the disease.

[0108] Other chips are produced with those differentially expressed genes that are only expressed in mild disease, a “mild RA” chip and those that are only differentially expressed in severe disease, a “severe RA” chip.

### Example 13

### Method for the Diagnosis and Staging of RA

[0109] mRNA is isolated from human synovial tissue, blood and human synovial fluid and treated as in Example 2. The microarray produced in Example 12 is analyzed for gene expression. From the analysis of up-and down-regulated genes a diagnosis and analysis of disease is made. The patient is monitored periodically during active disease and/or treatment. A prognosis is made based on these results as to the severity and chronic nature of the disease as well as the speed of deformity.

### Example 14

### Treatment of RA by Inhibiting Expression of Up-Regulated Genes

[0110] One or more of the genes that are up-regulated in Examples 4-6 are inhibited using antisense oligonucleotides or triple helix oligonucleotides. The antisense oligonucleotides are produced using methods known to one of skill in the art. The antisense oligonucleotides are administered intravenously, intramuscularly, or within a joint and the symptoms and disease is monitored.

### Example 15

### Treatment of RA by Activating Expression of Down-Regulated Genes

[0111] One or more of the genes that are down-regulated in Example 7 are activated using known transcriptional activators. Alternatively, expression vectors are administered that are targeted to the synovia and express one or more of the genes that are down-regulated. Preferably, the expression vectors are retroviral and are administered intravenously. The transcriptional activators and vectors are produced using methods known to one of skill in the art.

### Example 16

### Treatment of RA by Administration of Down-Regulated Proteins

[0112] One or more of the proteins that are down-regulated in Example 7 are purified and administered. The proteins are administered intravenously or into the joint.

### Example 17

### Use of Fibrinogen/Angiopoietin-Related Protein to Enhance Angiogenesis in Synovial Tissues and to Define the Involvement in Arthritic Processes

[0113] Because primers for fibrinogen/angiopoietin-related protein amplified a 270 base pair product from cDNA synthesized from mRNA from synovial tissues of RA patients, this suggests that this protein is involved in some way in the pathogenic process. Thus, expression of fibrinogen/angiopoietin-related protein is analyzed in various forms of RA and in situ in synovial tissue. If over-expression is identified in the process, anti-sense oligonucleotides are used to inhibit expression of fibrinogen/angiopoietin-related protein in synovia or systemically in the RA patients.

### Example 18

### Determination of the Best Treatment for a Patient with RA

[0114] From the results of the gene expression analysis, the best treatment for the patients with RA is determined. The treatment is based on the specific gene expression profile.

[0115] Thus, synovial fluid from a patient with rheumatoid arthritis is analyzed using a microarray as in Example 2. The analysis is used to identify the genes that are specifically up-regulated or down-regulated in that patient. Then, the treatment is selected based on the specific gene expression.

[0116] Although described in the context of certain preferred embodiments, the skilled artisan will appreciate that various changes and modifications can be made to the preferred embodiments, and such changes and modifications are meant to be encompassed by the invention, as defined by the appended claims.

### Example 19

### Correlation of mRNA Overexpression in CIA with Human Gene and Function: FARP

[0117] Microarray analyses identified fibrinogen/angiopoietin related protein (FARP) as one of the most highly over-expressed mRNAs (8734 tested) in arthritic paws of mice with collagen-induced arthritis (CIA). See Table 1, Cluster C, Mouse # W13905; Fibrinogen/angiopoietin-related protein. Data also demonstrated that human FARP. Data also demonstrated that human FARP mRNA is expressed in rheumatoid arthritis (RA) synovium. FARP is highly homologous to angiogenic factors and inhibits apoptosis of vascular endothelial cells in vitro. In RA, an increase in blood vessel formation, or angiogenesis, is observed in synovial tissue. Endothelial cells lining blood vessels can provide nutrients for inflamed tissue, allow infiltration of inflammatory cells, and secrete inflammatory cytokines, all of which contribute to disease processes. The suppression of arthritis by angiogenic inhibitors in animal models, such as CIA, further demonstrates that angiogenesis is necessary for arthritis. Mouse FARP mRNA is highly expressed during early stages of CIA and human FARP mRNA is expressed in RA synovial tissue.

### Example 20

### Characterizing FARP Expression in CIA

[0118] Prior to the present invention, FARP had not been described in arthritis. Localization of the cells that produce FARP mRNA and protein within the joint permits analysis FARP's role in angiogenesis in CIA. The cell types producing FARP mRNA and protein are determined and the role of FARP protein expression as it relates to the mRNA expression during CIA is identified.

[0119] Determination of spatial expression of FARP mRNA during CIA. DBA/1 mice are immunized with collagen as described in Thornton, et al. (1999) Arthritis Rheum 42:1109-1118. Mice are sacrificed 21, 28, 35, 42 and 49 days following primary collagen immunization. In situ hybridization analysis of FARP mRNA expression using sense and antisense probes generated from the FARP mouse cDNA are performed on tissue sections from paws of normal, unimmunized mice and arthritic mice.

[0120] Generation of antibody to FARP. An anti-FARP antibody is generated as described in Kim I, et al, (2000) Biochem J 346:603-610, and used for immunodetection and blocking of FARP function. Nucleotides 298 to 866 of the cDNA coding for the mouse FARP protein are cloned into the mammalian expression vector pcDNA3.1/His, which incorporates a histidine tag for easy isolation of the recombinant protein (Invitrogen, Carlsbad, Calif.). Following purification, this protein fragment encoding amino acids 100-289 of mouse FARP is injected into rabbits and serum is collected. Polyclonal antibody is purified from rabbit serum by ammonium sulfate precipitation and protein A column chromatography as described in Harlow E, et al, (1988) Antibodies: A laboratory manual. Cold Spring Harbor, N.Y., Cold Spring Harbor Laboratory; and Shanley J D, et al, (1994) J Infect Dis 169:1088-1091.

[0121] Determination of spatial and temporal expression of FARP protein during CIA. Since protein levels do not always directly reflect mRNA levels of a gene, the protein expression of FARP is determined in arthritic CIA paws using the anti-mouse FARP polyclonal antibody generated above. FARP protein is localized immunohistochemically using a horseradish peroxidase conjugated anti-rabbit secondary antibody. Sections are processed from paws of non-immunized mice and from paws of mice sacrificed 21, 28, 35, 42 and 49 days following primary collagen injection. Sera from non-immunized rabbits are used as a negative control. Sections from mouse liver are used as a positive control for immunohistochemical staining.

[0122] Results. In situ mRNA analysis demonstrates expression of FARP mRNA in the inflamed area of arthritic paws. FARP mRNA and protein are seen to be more highly expressed early in disease. In some embodiments, FARP protein is localized to the vasculature in arthritic paws. Blood vessel formation in CIA paws is readily observed by standard hematoxylin and eosin staining. However, co-localization of vasculature and FARP expression is demonstrated by analysis of serial sections for expression of endothelial cell-specific markers, such as von Willebrand factor Lu J, et al, (2000) J Immunol 164:5922-5927, in conjunction with FARP expression. The anti-human FARP polyclonal Ab from Kim, et. al. will be obtained, as this antibody will likely crossreact with mouse FARP. The homologous portion of mouse FARP protein that was previously used by Kim, et. al., is used to generate anti-human FARP polyclonal antibodies. Successful use of this polyclonal antibody in immunohistochemical staining demonstrates that administration of this portion of the protein to rabbits can generate polyclonal antibody to FARP. Polyclonal antibodies are easier and faster to generate than monoclonal antibodies; in some embodiments, the use of an antibody to block FARP function involves generation of a monoclonal antibody.

### Example 21

### Determining the Anti-Apoptotic Effects of FARP on Endothelial Cells

[0123] The angiogenic protein Ang1 and FARP have anti-apoptotic effects on endothelial cells. Ang1 mediates its anti-apoptotic effects by activating Tie2, an endothelial cell-specific receptor, resulting in phosphorylation of the serine-threonine kinase, Akt (protein kinase B) and mRNA upregulation of the apoptosis inhibitor, survivin. Papapetropoulos A, et al, (2000) J Biol Chem 275:9102-9105. FARP does not bind Tie2, but is highly homologous to Ang1 and is a secreted protein with anti-apoptotic effects on endothelial cells. FARP also has anti-apoptotic effects specific for endothelial cells, and is a secreted protein. Activation by FARP of an endothelial cell-specific receptor is found to result in the phosphorylation of specific anti-apoptotic intracellular molecules and increases mRNA expression of anti-apoptotic factors. Determination of the pathway that FARP utilizes in prolonging endothelial cell survival provides potential targets for therapeutic intervention. The effects of FARP on anti-apoptotic factors potentially regulating endothelial cell survival is identified.

[0124] In preferred embodiments, treatments and drug candidates that interfere with receptor binding by FARP lead to deactivation of the anti-apoptotic serine-threonine kinase, Akt, in endothelial cells. In further preferred embodiments, interference with expression of FARP, normal function of its receptor, and/or binding of FARP to its receptor also leads to decreased expression of survivin, Bcl2, and other anti-apoptotic factors in endothelial cells. Overall, these effects result in enhanced or normalized apoptosis of vascular endothelial cells in the arthritic joint, leading to a diminution or reversal of disease symptoms.

[0125] Expression and purification of recombinant mouse FARP (rmFARP). The entire cDNA coding for mouse FARP is inserted into the mammalian expression vector pcDNA3.1/His, which contains a six amino acid histidine tag for easy isolation of the protein (Invitrogen). The cDNA is transfected into COS-7 cells and purified from the cell supernatant. The anti-mouse FARP polyclonal antibody discussed above is used in Western blots to determine whether rmFARP is expressed in COS-7 cells.

[0126] Effects of FARP on endothelial cell expression of anti-apoptotic molecules. HUVEC (ATCC, Rockville, Md.) is treated with rmFARP in a range of 50 to 500 ng/ml as described for Ang1 (Papapetropoulos A, et al, (2000) J Biol Chem 275:9102-9105) and or with vehicle. RNA from these cells is analyzed by RNase protection assays (BD Pharmingen, San Diego, Calif.) for expression of the anti-apoptotic genes, survivin and Bcl-2, as previously performed in Thornton S, et al, (1999) Arthritis Rheum 42:1109-1118.

[0127] Effects of rmFARP administration on phosphorylation of serine-threonine kinases important in cell survival. Phosphorylation of the Akt survival serine threonine kinase is assessed as described in Papapetropoulos A, et al. Microvascular endothelial cells (Vec Technologies, Rensselaer, N.Y.) are treated with and without rmFARP. Anti-Akt antibody (Santa Cruz Biotechnology, Inc., Santa Cruz, Calif.) and phosphospecific Akt antibody (New England Biolabs, Beverly, Mass.) are used in Western blots to determine the amount of Akt protein present and the extent of Akt phosphorylation in these cells.

[0128] Results. rmFARP is found to increase the expression of survivin or Bcl-2 in endothelial cells, and also increases the phosphorylation of Akt. FARP is found to utilize a separate signaling pathway from Ang1, and other signaling molecules are thus analyzed for their role in the anti-apoptotic effects mediated by FARP. Additionally the anti-apoptotic molecules XIAP, c-IAP2 and NIAP are analyzed at the same time as survivin and Bcl-2 in the RNase protection analysis. These studies elucidate FARP's downstream effects that are mediated by a receptor.

### Example 22

### Determining the Role of FARP During CIA

[0129] Since FARP is one of the most highly overexpressed genes in CIA, and since it is also expressed in rheumatoid arthritis synovial tissue, its role in arthritis is tested both by administration and depletion of FARP before disease onset and during disease progression. In some embodiments, FARP aids in endothelial cell survival, allowing for increased inflammation in CIA. Thus, treatment with FARP can exacerbate CIA, and depletion of FARP can inhibit CIA. Recombinant mouse FARP, as well as antibodies to FARP, are administered before and during disease.

[0130] Effects of administration of rmFARP on the development and severity of CIA. rmFARP is administered i.p. to DBA/1 mice immunized with collagen. Based on published studies with other molecules (Thornton S, et al, (2000) J Immunol 165:1557-1563), FARP (10 ug/0.5 ml/mouse) is administered twice daily from days 14 to 21 following primary collagen immunization for testing effects before disease onset. For established disease, FARP is administered twice daily for seven days starting 24 hours after disease onset. Mice are scored daily for macroscopic signs of arthritis as described in Thornton S, et al, (1999) Arthritis Rheum 42:1109-1118. Mice are sacrificed at day 49 of disease and sections from treated and untreated mouse paws are analyzed histochemically for blood vessel formation and inflammatory cell infiltration by hematoxylin and eosin staining.

[0131] Effects of depletion of FARP on endothelial cell apoptosis. Antibody produced as described herein is used. Assessment of the ability of anti-FARP antibody to block the anti-apoptotic effects of FARP is performed in vitro with endothelial cell lines as described in Kim I, et al, (2000) Biochem J 346 Pt 3:603-610. Induction of apoptosis in HUVEC cells is performed by serum deprivation. HUVEC cells are grown for 24 hours in the presence of 10% serum and then incubated for 24 hours with the same media, or serum-free media with control buffer, rmFARP (200 and 800 ng/ml) or rmFARP plus anti-FARP antibody at varying concentrations. Analysis of apoptotic cells is as described in Kim, et al. Sera from unimmunized rabbits is used as a negative control.

[0132] Effects of depletion of FARP on the development and severity of CIA. Anti-FARP antibody is administered similarly to studies using anti-VEGF antibody in CIA (Sone H, et al, (2001) Biochem Biophys Res Commun 281:562-568). Antibody is delivered i.p. (200 ug/0.2 ml/mouse) every other day for 8 days both before (days 14-22) and during disease (24 hours after onset) as described above. Normal rabbit immunoglobulin and PBS are used as negative controls. Mice immunized with collagen are analyzed macroscopically and histologically as described above.

[0133] Results. It is found that administration of FARP protein to mice before disease onset can hasten the onset of disease, and that administration after disease onset can exacerbate disease symptoms and increase vasculature in the inflamed paws. Thus, in preferred embodiments, FARP is deleted by antibody. In alternative embodiments, a FARP knockout in DBA/1 mice is generated. Additionally, since FARP mRNA is synthesized in the rat embryo, it is implicated in embryonic development. In preferred embodiments, the antibody produced as described herein can block or interfere with the function of FARP. A polyclonal antibody produced in rabbits is optimized by using an affinity column made of the recombinant protein to purify the antibody. An alternative approach is to generate a monoclonal antibody. An advantage of using anti-FARP antibodies is the benefit of an antibody as a therapeutic agent.

### Example 23

### Involvement of FARP in Angiogenesis

[0134] FARP mRNA and protein are localized to the vascular endothelium in arthritic paws of CIA mice. Study of protein levels in such mice indicates that FARP protein levels correlate with FARP mRNA levels. Cells expressing FARP mRNA and protein during CIA are identified, and the kinetics of expression of FARP protein during CIA permits design of therapies and testing of candidate drugs having a specific and localized action on FARP mRNA and protein. Preferred therapies and drugs result in enhanced or normalized apoptosis of vascular endothelial cells in the arthritic joint, leading to a diminution or reversal of disease symptoms.

The application's sequence listing, which the Patent Office published only in electronic form, follows.

SEQUENCE LISTING (1446 sequences)

SEQ ID NO: 1 - DNA, 390 bp, Homo sapiens
atgggacggcgagacgcccagctcctggcagcgctcctcgtcctggggctatgtgccctggcggggagtgagaaaccctccccctgccagtgctccaggctgagcccccataacaggacgaactgcggcttccctggaatcaccagtgaccagtgttttgacaatggatgctgtttcgactccagtgtcactggggtcccctggtgtttccaccccctcccaaagcaagagtcggatcagtgcgtcatggaggtctcagaccgaagaaactgtggctacccgggcatcagccccgaggaatgcgcctctcggaagtgctgcttctccaacttcatctttgaagtgccctggtgcttcttcccgaagtctgtggaagactgccattactaa

SEQ ID NO: 2 - DNA, 481 bp, Homo sapiens
ggcacgaggcagagacggaaccagagacaggccagagcatccccctcctccaccatgaaactcgctgtcaccctcaccctggtcacactggctctctgctgcagctccgcttctgcagagatctgcccgagctttcagcgtgtcatcgaaaccctcctcatggacacaccctccagttatgaggctgccatggaacttttcagccctgatcaagacatgagggaggcaggggctcagctgaagaagctggtggacaccctcccccaaaagcccagagaaagcatcattaagctcatggaaaaaatagcccaaagctcactgtgtaattagcatttagaagctgaagatccccaactgctccagcctctgccgctgccatgctttgagtccacgcccaccagccttgctctcttcaataaaccacaagcatctcaaaaaaaaaaaaaaaaaaaaaaaaaaaaaaaaaaaaaaaaaaaaaaaa

SEQ ID NO: 3 - DNA, 1049 bp, Homo sapiens
ggagtgggggagagagaggagaccaggacagctgctgagacctctaagaagtccagatactaagagcaaagatgtttcaaactgggggcctcattgtcttctacgggctgttagcccagaccatggcccagtttggaggcctgcccgtgcccctggaccagaccctgcccttgaatgtgaatccagccctgcccttgagtcccacaggtcttgcaggaagcttgacaaatgccctcagcaatggcctgctgtctgggggcctgttgggcattctggaaaaccttccgctcctggacatcctgaagcctggaggaggtacttctggtggcctccttgggggactgcttggaaaagtgacgtcagtgattcctggcctgaacaacatcattgacataaaggtcactgacccccagctgctggaacttggccttgtgcagagccctgatggccaccgtctctatgtcaccatccctctcggcataaagctccaagtgaatacgcccctggtcggtgcaagtctgttgaggctggctgtgaagctggacatcactgcagaaatcttagctgtgagagataagcaggagaggatccacctggtccttggtgactgcacccattcccctggaagcctgcaaatttctctgcttgatggacttggccccctccccattcaaggtcttctggacagcctcacagggatcttgaataaagtcctgcctgagttggttcagggcaacgtgtgccctctggtcaatgaggttctcagaggcttggacatcaccctggtgcatgacattgttaacatgctgatccacggactacagtttgtcatcaaggtctaagccttccaggaaggggctggcctctgctgagctgcttcccagtgctcacagatggctggcccatgtgctggaagatgacacagttgccttctctccgaggaacctgccccctctcctttcccaccaggcgtgtgtaacatcccatgtgcctcacctaataaaatggctcttcttctgcaaaaaaaaaaaaaaaaaaaaaaaaaaaaa

SEQ ID NO: 4 - DNA, 2407 bp, Homo sapiens
ggtgcaggcagcggccgccgccgccgagacagctgcgcgggcgagcatccccacgcagcaggcacgaggcggagggggctcagtccgcagccgccgccgccaccgccgcgcctcggcctcccttggaagttgttttcaaccatatccagcctttgccgaatacatcctatctgccacacatccagcgtgaggtccctccagctacaaggtgggcaccatggcggagaagtttgactgccactactgcagggatcccttgcaggggaagaagtatgtgcaaaaggatggccaccactgctgcctgaaatgctttgacaagttctgtgccaacacctgtgtggaatgccgcaagcccatcggtgcggactccaaggaggtgcactataagaaccgcttctggcatgacacctgcttccgctgtgccaagtgccttcaccccttggccaatgagacctttgtggccaaggacaacaagatcctgtgcaacaagtgcaccactcgggaggactcccccaagtgcaaggggtgcttcaaggccattgtggcaggagatcaaaacgtggagtacaaggggaccgtctggcacaaagactgcttcacctgtagtaactgcaagcaagtcatcgggactggaagcttcttccctaaaggggaggacttctactgcgtgacttgccatgagaccaagtttgccaagcattgcgtgaagtgcaacaaggccatcacatctggaggaatcacttaccaggatcagccctggcatgccgattgctttgtgtgtgttacctgctctaagaagctggctgggcagcgtttcaccgctgtggaggaccagtattactgcgtggattgctacaagaactttgtggccaagaagtgtgctggatgcaagaaccccatcactgggtttggtaaaggctccagtgtggtggcctatgaaggacaatcctggcacgactactgcttccactgcaaaaaatgctccgtgaatctggccaacaagcgctttgttttccaccaggagcaagtgtattgtcccgactgtgccaaaaagctgtaaactgacaggggctcctgtcctgtaaaatggcatttgaatctcgttctttgtgtccttactttctgccctataccatcaataggggaagagtggtccttcccttctttaaagttctccttccgtcttttctcccattttacagtattactcaaataagggcacacagtgatcatattagcatttagcaaaaagcaaccctgcagcaaagtgaatttctgtccggctgcaatttaaaaatgaaaacttaggtagattgactcttctgcatgtttctcatagagcagaaaagtgctaatcatttagccacttagtgatgtaagcaagaagcataggagataaaacccccactgagatgcctctcatgcctcagctgggacccaccgtgtagacacacgacatgcaagagttgcagcggctgctccaactcactgctcaccctcttctgtgagcaggaaaagaaccctactgacatgcatggtttaacttcctcatcagaactctgcccttccttctgttcttttgtgctttcaaataactaacacgaacttccagaaaattaacatttgaacttagctgtaattctaaactgacctttccccgtactaacgtttggtttccccgtgtggcatgttttctgagcgttcctactttaaagcatggaacatgcaggtgatttgggaagtgtagaaagacctgagaaaacgagcctgtttcagaggaacatcgtcacaacgaatacttctggaagcttaacaaaactaaccctgctgtcctttttattgtttttaattaatatttttgttttaattgatagcaaaatagtttatgggtttggaaacttgcatgaaaatattttagccccctcagatgttcctgcagtgctgaaattcatcctacggaagtaaccgcaaaactctagagggggagttgagcaggcgccagggctgtcatcaacatggatatgacatttcacaacagtgactagttgaatcccttgtaacgtagtagttgtctgctctttgtccatgtgttaatgaggactgcaaagtcccttctgttgtgattcctaggacttttcctcaagaggaaatctggatttccacctaccgcttacctgaaatgcaggatcacctacttactgtattctacattattatatgacatagtataatgagacaatatcaaaagtaaacatgtaatgacaatacatactaacattcttgtaggagtggttagagaagctgatgcctcatttctacattctgtcattagctattatcatctaacgtttcagtgtatccttacagaaataaagcagcatatgaaaaaaaaaaaaaaaaaaaaaaa

SEQ ID NO: 5 - DNA, 2343 bp, Homo sapiens
atacgactacacctgctccggagcccgcggcggtacctgcagcggaggagctctgtcttccccttcatctcacgcgagcccggcgtcccgccgcgtgcgccccggcgcagcccgccagtccgcccggagcccgcccagtcgccgcgctgcacgcccggggtgaaccctctgccctcgctgggacagagggccccgcagccgtcatgctttccgccatctacacagtcctggcgggactgctgttcctgccgctcctggtgaacctctgctgcccatacttcttccaggacataggctacttcttgaaggtggccgccgtgggccggagggtgcgcagctacgggcagcggcggccggcgcgcaccatcctgcgggcgttcctggagaaagcgcgccagacgccacacaagccttttctgctcttccgcgacgagactctcacctacgcgcaggtggaccggcgcagcaatcaagtggcccgggcgctgcacgaccacctcggcctgcgccagggagactgcgtggcgctccttatgggtaacgagccggcctacgtgtggctgtggctggggctggtgaagctgggctgtgccatggcgtgcctcaattacaacatccgcgcgaagtccctgctgcactgcttccagtgctgcggggcgaaggtgctgctggtgtcgccagaactacaagcagctgtcgaagagatactgccaagccttaaaaaagatgatgtgtccatctattatgtgagcagaacttctaacacagatgggattgactctttcctggacaaagtggatgaagtatcaactgaacctatcccagagtcatggaggtctgaagtcactttttccactcctgccttatacatttatacttctggaaccacaggtcttccaaaagcagccatgatcactcatcagcgcatatggtatggaactggcctcacttttgtaagcggattgaaggcagatgatgtcatctatatcactctgcccttttaccacagtgctgcactactgattggcattcacggatgtattgtggctggtgctactcttgccttgcggactaaattttcagccagccagttttgggatgactgcagaaaatacaacgtcactgtcattcagtatatcggtgaactgcttcggtatttatgcaactcaccacagaaaccaaatgaccgtgatcataaagtgagactggcactgggaaatggcttacgaggagatgtgtggagacaatttgtcaagagatttggggacatatgcatctatgagttctatgctgccactgaaggcaatattggatttatgaattatgcgagaaaagttggtgctgttggaagagtaaactacctacagaaaaaaatcataacttatgacctgattaaatatgatgtggagaaagatgaacctgtccgtgatgaaaatggatattgcgtcagagttcccaaaggtgaagttggacttctggtttgcaaaatcacacaacttacaccatttaatggctatgctggagcaaaggctcagacagagaagaaaaaactgagagatgtctttaagaaaggagacctctatttcaacagtggagatctcttaatggttgaccatgaaaatttcatctatttccacgacagagttggagatacattccggtggaaaggggaaaatgtggccaccactgaagttgctgatacagttggactggttgattttgtccaagaagtaaatgtttatggagtgcatgtgccagatcatgagggtcgcattggcatggcctccatcaaaatgaaagaaaaccatgaatttgatggaaagaaactctttcagcacattgctgattacctacctagttatgcaaggccccggtttctaagaatacaggacaccattgagatcactggaacttttaaacaccgcaaaatgaccctggtggaggagggctttaaccctgctgtcatcaaagatgccttgtatttcttggatgacacagcaaaaatgtatgtgcctatgactgaggacatctataatgccataagtgctaaaaccctgaaactctgaatattcccaggaggataactcaacatttccagaaagaaactgaatggacagccacttgatataatccaactttaatttgattgaagattgtgaggaaattttgtaggaaatttgcatacccgtaaagggagacttttttaaataacagttgagtctttgcaagtaaaaagatttagagattattatttttcagtgtgcacctactgtttgtatttgcaaactgagcttgttggagggaaggcattattttttaaaatacttagtaaattaaatgaac

SEQ ID NO: 6 - DNA, 4070 bp, Homo sapiens
acgcggcctgctcaggcctccagcggccggtcggaggggaggcgggaggcgagcgaggacccgcgcccgcagtccagtctgtgcgcgcccgtgctcgcttggcgcggtgcgggaccagcgccggccacccgaagcctagtgcgtcgccgggtgggtgggcccgcccggcgccatgggctcaggatgccggtgcggaggggccacgtcgcgccgcagaacaccttcctggacaccatcatccgcaagtttgagggccagagccgtaagttcatcatcgccaacgctcgggtggagaactgcgccgtcatctactgcaacgacggcttctgcgagctgtgcggctactcgcgggccgaggtgatgcagcgaccctgcacctgcgacttcctgcacgggccgcgcacgcagcgccgcgctgccgcgcagatcgcgcaggcactgctgggcgccgaggagcgcaaagtggaaatcgccttctaccggaaagatgggagctgcttcctatgtctggtggatgtggtgcccgtgaagaacgaggatggggctgtcatcatgttcatcctcaatttcgaggtggtgatggagaaggacatggtggggtccccggctcatgacaccaaccaccggggcccccccaccagctggctggccccaggccgcgccaagaccttccgcctgaagctgcccgcgctgctggcgctgacggcccgggagtcgtcggtgcggtcgggcggcgcgggcggcgcgggcgccccgggggccgtggtggtggacgtggacctgacgcccgcggcacccagcagcgagtcgctggccctggacgaagtgacagccatggacaaccacgtggcagggctcgggcccgcggaggagcggcgtgcgctggtgggtcccggctctccgccccgcagcgcgcccggccagctcccatcgccccgggcgcacagcctcaaccccgacgcctcgggctccagctgcagcctggcccggacgcgctcccgagaaagctgcgccagcgtgcgccgcgcctcgtcggccgacgacatcgaggccatgcgcgccggggtgctgcccccgccaccgcgccacgccagcaccggggccatgcacccactgcgcagcggcttgctcaactccacctcggactccgacctcgtgcgctaccgcaccattagcaagattccccaaatcaccctcaactttgtggacctcaagggcgaccccttcttggcttcgcccaccagtgaccgtgagatcatagcacctaagataaaggagcgaacccacaatgtcactgagaaggtcacccaggtcctgtccctgggcgccgacgtgctgcctgagtacaagctgcaggcaccgcgcatccaccgctggaccatcctgcattacagccccttcaaggccgtgtgggactggctcatcctgctgctggtcatctacacggctgtcttcacaccctactcggctgccttcctgctgaaggagacggaagaaggcccgcctgctaccgagtgtggctacgcctgccagccgctggctgtggtggacctcatcgtggacatcatgttcattgtggacatcctcatcaacttccgcaccacctacgtcaatgccaacgaggaggtggtcagccaccccggccgcatcgccgtccactacttcaagggctggttcctcatcgacatggtggccgccatccccttcgacctgctcatcttcggctctggctctgaggagctgatcgggctgctgaagactgcgcggctgctgcggctggtgcgcgtggcgcggaagctggatcgctactcagagtacggcgcggccgtgctgttcttgctcatgtgcacctttgcgctcatcgcgcactggctagcctgcatctggtacgccatcggcaacatggagcagccacacatggactcacgcatcggctggctgcacaacctgggcgaccagataggcaaaccctacaacagcagcggcctgggcggcccctccatcaaggacaagtatgtgacggcgctctacttcaccttcagcagcctcaccagtgtgggcttcggcaacgtctctcccaacaccaactcagagaagatcttctccatctgcgtcatgctcattggctccctcatgtatgctagcatcttcggcaacgtgtcggccatcatccagcggctgtactcgggcacagcccgctaccacacacagatgctgcgggtgcgggagttcatccgcttccaccagatccccaatcccctgcgccagcgcctcgaggagtacttccagcacgcctggtcctacaccaacggcatcgacatgaacgcggtgctgaagggcttccctgagtgcctgcaggctgacatctgcctgcacctgaaccgctcactgctgcagcactgcaaacccttccgaggggccaccaagggctgccttcgggccctggccatgaagttcaagaccacacatgcaccgccaggggacacactggtgcatgctggggacctgctcaccgccctgtacttcatctcccggggctccatcgagatcctgcggggcgacgtcgtcgtggccatcctggggaagaatgacatctttggggagcctctgaacctgtatgcaaggcctggcaagtcgaacggggatgtgcgggccctcacctactgtgacctacacaagatccatcgggacgacctgctggaggtgctggacatgtaccctgagttctccgaccacttctggtccagcctggagatcaccttcaacctgcgagataccaacatgatcccgggctcccccggcagtacggagttagagggtggcttcagtcggcaacgcaagcgcaagttgtccttccgcaggcgcacggacaaggacacggagcagccaggggaggtgtcggccttggggccgggccgggcgggggcagggccgagtagccggggccggccgggggggccgtggggggagagcccgtccagtggcccctccagccctgagagcagtgaggatgagggcccaggccgcagctccagccccctccgcctggtgcccttctccagccccaggccccccggagagccgccgggtggggagcccctgatggaggactgcgagaagagcagcgacacttgcaaccccctgtcaggcgccttctcaggagtgtccaacattttcagcttctggggggacagtcggggccgccagtaccaggagctccctcgatgccccgcccccacccccagcctcctcaacatccccctctccagcccgggtcggcggccccggggcgacgtggagagcaggctggatgccctccagcgccagctcaacaggctggagacccggctgagtgcagacatggccactgtcctgcagctgctacagaggcagatgacgctggtcccgcccgcctacagtgctgtgaccaccccggggcctggccccacttccacatccccgctgttgcccgtcagccccctccccaccctcaccttggactcgctttctcaggtttcccagttcatggcgtgtgaggagctgcccccgggggccccagagcttccccaagaaggccccacacgacgcctctccctaccgggccagctgggggccctcacctcccagcccctgcacagacacggctcggacccgggcagttagtggggctgcccagtgtggacacgtggctcacccagggatcaaggcgctgctgggccgctccccttggaggccctgctcaggaggccctgaccgtggaaggggagaggaactcgaaagcacagctcctcccccagcccttgggaccatcttctcctgcagtcccctgggccccagtgagaggggcaggggcagggccggcagtaggtggggcctgtggtccccccactgccctgagggcattagctggtctaactgcccggaggcacccggccctgggccttaggcacctcaaggacttttctgctatttactgctcttattgttaaggataataattaaggatcatatgaataattaatgaagatgctgatgactatgaataataaataattatcctgaggagaaaa

SEQ ID NO: 7 - DNA, 2436 bp, Homo sapiens
cgaccacctgtctggacaccacaaagatgccacccgttgggggcaaaaaggccaagaagggcatcctagaacgtttaaatgctggagagattgtgattggagatggagggtttgtctttgcactggagaagaggggctacgtaaaggcaggaccctggactcctgaagctgctgtggagcacccagaagcagttcgccagcttcatcgagagttcctcagagctggctcaaacgtcatgcagaccttcaccttctatgcgagtgaagacaagctggagaacaggggcaactatgtcttagagaagatatctgggcaggaagtcaatgaagctgcttgcgacatcgcccgacaagtggctgatgaaggagatgctttggtagcaggaggagtgagtcagacaccttcataccttagctgcaagagtgaaactgaagtcaaaaaagtatttctgcaacagttagaggtctttatgaagaagaacgtggacttcttgattgcagagtattttgaacacgttgaagaagctgtgtgggcagttgaaaccttgatagcatccggtaaacctgtggcagcaaccatgtgcattggcccagaaggagatttgcatggcgtgccccccggcgagtgtgcagtgcgcctggtgaaagcaggagcatccatcattggtgtgaactgccactttgaccccaccattagtttaaaaacagtgaagctcatgaaggagggcttggaggctgcccaactgaaagctcacctgatgagccagcccttggcttaccacactcctgactgcaacaagcagggattcatcgatctcccagaattcccatttggactggaacccagagttgccaccagatgggatattcaaaaatacgccagagaggcctacaacctgggggtcaggtacattggcgggtgctgtggatttgagccctaccacatcagggcaattgcagaggagctggccccagaaaggggctttttgccaccagcttcagaaaaacatggcagctggggaagtggtttggacatgcacaccaaaccctgggttagagcaagggccaggaaggaatactgggagaatcttcggatagcctcaggccggccatacaacccttcaatgtcaaagccagatggctggggagtgaccaaaggaacagccgagctgatgcagcagaaagaagccacaactgagcagcagctgaaagagctctttgaaaaacaaaaattcaaatcacagtagcctcgatagaagctatttttgatgaatttctaggtgtttgggtcacagttcctacaaatacggaaaagggggttaaaaagcagtgctttcatgaatgccatcctacacatattattgctattacctgaacaaaatagaattacaaatagcacttgataattttaaagtatgttttagaaattttcttaggagcaaaataagtacaaagtaaatcttgaacaggttcactaagcacccaccctgtgaaaagtattatggaaatcactgcagcacaggaaaagtaattcagatgttaatgccacttgaagaagttggtaggctagcaaagaggatgagacatgaactgtcataaaggactcagcaaccagccagggacagataaagcgctatggaaaggggcttccaagttcttttgaacatgacccttagtaacaaacacaatttatataatgacccagcaaaacacatcacatcttactgtcgaaattaaatgtgtgatccatcctagtattttctgttccattccttttcattctatttcatttataaaacatgctagttgagacttttcaaatggatttttatgacccactactgggtttggatccacagtttgaaaaatattgctacaagacacttaaggagaccatcctgtttaagtttattcttataagtaggtcagtcatatgagacctgatcaataaatatccaatacccagagtcctgctctcagagttcttctgtttcgtgacccacttttctaccagtaaaagacatagaccaatggggaggaggggaggagagatggatatttcagccctctccatcctagtcaacactggatccacctagtgcctctgggccataaggctgagcagagtgagcttgtattagttggtagcttttaaaaaatataataaaaaaaaagtagagattctccaaactctagcctggtttcctagattgagaactatgatatttttctctgataatttaatatctactctcctacaaaagctcaagcctgaagatacaagactattagaagaaacatgactaccctcagtgtattagaaaagaggtcatgcagctttctaaacattattgaattgtttgagctgttttgaaattgtaattcttttcagctattaaaaagaagagcaatgagaaaaaaaaaaaaaaaaaaaaa

SEQ ID NO: 8 - DNA, 1066 bp, Homo sapiens
accccagctgttggggccaggacacccagtgagcccatacttgctctttttgtcttcttcagactgcgccatggggctcagcgacggggaatggcagttggtgctgaacgtctgggggaaggtggaggctgacatcccaggccatgggcaggaagtcctcatcaggctctttaagggtcacccagagactctggagaagtttgacaagttcaagcacctgaagtcagaggacgagatgaaggcatctgaggacttaaagaagcatggtgccactgtgctcaccgccctgggtggcatccttaagaagaaggggcatcatgaggcagagattaagcccctggcacagtcgcatgccaccaagcacaagatccccgtgaagtacctggagttcatctcggaatgcatcatccaggttctgcagagcaagcatcccggggactttggtgctgatgcccagggggccatgaacaaggccctggagctgttccggaaggacatggcctccaactacaaggagctgggcttccagggctaggcccctgccgctcccacccccacccatctgggccccgggttcaagagagagcggggtctgatctcgtgtagccatatagagtttgcttctgagtgtctgctttgtttagtagaggtgggcaggaggagctgaggggctggggctggggtgttgaagttggctttgcatgcccagcgatgcgcctccctgtgggatgtcatcaccctgggaaccgggagtgcccttggctcactgtgttctgcatggtttggatctgaattaattgtcctttcttctaaatcccaaccgaacttcttccaacctccaaactggctgtaaccccaaatccaagccattaactacacctgacagtagcaattgtctgattaatcactggccccttgaagacagcagaatgtccctttgcaatgaggaggagatctgggctgggcgggccagctggggaagcatttgactatctggaacttgtgtgtgcctcctcaggtatggcagtgactcacctggttttaataaaacaacctgcaacatctc

SEQ ID NO: 9 - DNA, 2218 bp, Homo sapiens
acgagactctctcctcctcctcacctcattgtctccccgacttatcctaatgcgaaattggattctgagcatttgtagcaaaatcgctgggatctggagaggaagactcagtccagaatcctcccagggccttgaaagtccatctctgacccaaaacaatccaaggaggtagaagacatcgtagaaggagtgaaagaagaaaagaagacttagaaacatagctcaaagtgaacactgcttctcttagtttcctggatttcttctggacatttcctcaagatgaaacttcagacactttggagttttttttgaagaccaccataaagaaagtgcatttcaattgaaaaatttggatgggatcaaaaatgaatctcattgaacattcccatttacctaccacagatgaattttctttttctgaaaatttatttggtgttttaacagaacaagtggcaggtcctctgggacagaacctggaagtggaaccatactcgcaatacagcaatgttcagtttccccaagttcaaccacagatttcctcgtcatcctattattccaacctgggtttctacccccagcagcctgaagagtggtactctcctggaatatatgaactcaggcgtatgccagctgagactctctaccagggagaaactgaggtagcagagatgcctgtaacaaagaagccccgcatgggcgcgtcagcagggaggatcaaaggggatgagctgtgtgttgtttgtggagacagagcctctggataccactataatgcactgacctgtgaggggtgtaaaggtttcttcaggagaagcattaccaaaaacgctgtgtacaagtgtaaaaacgggggcaactgtgtgatggatatgtacatgcgaagaaagtgtcaagagtgtcgactaaggaaatgcaaagagatgggaatgttggctgaatgcttgttaactgaaattcagtgtaaatctaagcgactgagaaaaaatgtgaagcagcatgcagatcagaccgtgaatgaagacagtgaaggtcgtgacttgcgacaagtgacctcgacaacaaagtcatgcagggagaaaactgaactcaccccagatcaacagactcttctacattttattatggattcatataacaaacagaggatgcctcaggaaataacaaataaaattttaaaagaagaattcagtgcagaagaaaattttctcattttgacggaaatggcaaccaatcatgtacaggttcttgtagaattcacaaaaaagctaccaggatttcagactttggaccatgaagaccagattgctttgctgaaagggtctgcggttgaagctatgttccttcgttcagctgagattttcaataagaaacttccgtctgggcattctgacctattggaagaaagaattcgaaatagtggtatctctgatgaatatataacacctatgtttagtttttataaaagtattggggaactgaaaatgactcaagaggagtatgctctgcttacagcaattgttatcctgtctccagatagacaatacataaaggatagagaggcagtagagaagcttcaggagccacttcttgatgtgctacaaaagttgtgtaagattcaccagcctgaaaatcctcaacactttgcctgtctcctgggtcgcctgactgaattacggacattcaatcatcaccacgctgagatgctgatgtcatggagagtaaacgaccacaagtttaccccacttctctgtgaaatctgggacgtgcagtgatggggattacaggggaggggtctagctcctttttctctctcatattaatctgatgtataactttcctttatttcacttgtacccagtttcactcaagaaatcttgatgaatatttatgttgtaattacatgtgtaacttccacaactgtaaatattgggctagatagaacaactttctctacattgtgttttaaaaggctccagggaatcctgcattctaattggcaagccctgtttgcctaattaaattgattgttacttcaattctatctgttgaactagggaaaatctcattttgctcatcttaccatattgcatatattttattaaagagttgtattcaatcttggcaataaagcaaacataatggcaacagaaaaaaaaaaaaaaaaaaaaaaaaaaaaaaaaaaaaaaaaaaaaaaaaaaaaaaaaaaaaaaaaaaaaaa

SEQ ID NO: 10 - DNA, 1396 bp, Homo sapiens
gcattccccacacaacacccacactcagccactgcgggcgaggagggcacgaggccaggttcccaagagctcaggtttgtcctggaacccagatggactgtggccgggcaagtggatcacaggcctggccagcctaggagttgccacatgtgaggggccgaggggctcaaggaggggaacatcggggagaggagcctactgggtggaggctgggggtcccagcaggaaatggtgagacaaagggcgctggctggcaggaagacagcacaggaaggtcctagaggttcctcagtgcagctggactctcctggagaccttcacacaccctgacatctgggccccgttccacgagggtgctttcactggtctgcaccatggcccaggccctgggattttgaacagctccgcaggtgaatgaaaggaacatggagctgatccaggacatctctcgcccgccactggagtacgtgaagggggtcccgctcatcaagtactttgcagaggcactggggcccctgcagagcttccaggcccggcctgatgacctgctcatcagcacctaccccaagtccggcaccacctgggtgagccagattctggacatgatctaccagggcggtgacctggaaaagtgtcaccgagctcccatcttcatgcgggtgcccttccttgagttcaaagtcccagggattccctcagggatggagactctgaaaaacacaccagccccacgactcctgaagacacacctgcccctggctctgctcccccagactctgttggatcagaaggtcaaggtggtctatgttgcccgcaacgcaaaggatgtggcggtttcctactaccacttctaccacatggccaaagtgtaccctcaccctgggacctgggaaagcttcctggagaagttcatggctggagaagtgtcctatgggtcctggtaccagcacgtgcaagagtggtgggagctgagccgcacccaccctgttctctacctcttctatgaagacatgaaggagaaccccaaaagggagattcaaaagatcctggagtttgtggggcgctccctgccagaggagactgtggacctcatggttgagcacacgtcgttcaaggagatgaagaagaaccctatgaccaactacaccaccgtccgccgggagttcatggaccacagcatctcccccttcatgaggaaaggcatggctggggactggaagaccaccttcaccgtggcgcagaatgagcgcttcgatgcggactatgcggagaagatggcaggctgcagcctcagcttccgctctgagctgtgagaggggttcctggagtcactgcagagggagtgtgcgaatcaagcctgaccaagaggctccagaataaagtatgatttgtgttc

SEQ ID NO: 11 - DNA, 1690 bp, Homo sapiens
gaagcattgaggaggatcacacacacagttgtagggagaacacagagaagtaaattgctgacaaacaagcagggatggacctggtttcagctctctcactggaaacctgggtgctcctagcaatcagcttggtgctcctctaccgatatgggactcgtaaacatgaactttttaagaaacagggaattcctgggcccaaacctctgccatttttaggcactgtgctgaattattacaagggtttatggaaattcgacatggagtgctataaaaagtatggaaaaacatgggggttgtttgatggtcaaacgcctctccttgctgtcacagacccagagacgattaagaatgtgctagtgaaggaatgtttttctgtcttcacaaaccggcgggattttggcccagtggggataatgagtaaagctatctcaatatctaaggatgatgaatggaagagatatagagctttgctgtcccccacattcaccagtggaaaactcaaggagatgttccctgtcattgaacagtatggagacattttggtaaagtacttgaggcagaaggcaaagaaaggcaagcctgttactatgaaagatgtgttaggtgcttacagcatggatgtgatcaccagcacatcatttggagtgaacgtggattccctcaacaacccagaggatccttttgtggagaaagccaaaaagcttttaagatttgatttttttgatcctttgctcttctcagtagtactttttccattcctgacaccagtatatgagatgttaaatatctgcatgttcccaaaggattcaatagaatttttcaaaaaatttgtggacagaatgaaggaaagccgcctggattctaagcagaagcaccgagtggattttcttcagctgatgatgaattctcataataattccaaagacaaagtctctcataaagccctttctgacatggagatcacagcccagtcaattatctttatttttgctgggtatgaaaccaccagtagcacactttccttcaccctgcattccttggccactcaccctgatatccagaaaaaactgcaggatgagatcgatgaggctctgcccaacaaggcacctcccacgtatgatactgtgatggagatggaatacctggatatggtgcttaatgaaaccctcagattatatcccattgctaatagacttgagagagtctgtaagaaagatgttgaactcaatggtgtgtatatccccaaagggtcaacagtgatgattccatcttatgctcttcaccatgacccacagcactggtcagagcctgaagaattccaacctgaaaggttcagcaaggagaacaagggcagcattgatccttatgtatatctgccctttgggaatggacccaggaactgccttggcatgaggtttgctctcatgaatatgaaacttgctctcactaaaattatgcagaacttctccttccagccttgtaaggaaacacagatacctctgaaattaagcagacaaggacttcttcaaccagaaaaacccattgttctaaaggttgtgccacgggatgcagtcataactggagcatgagtctccctcaaggagttcttctgagttcttcagaaaggcagtgtctaagaacatcggacattttagtttcatcatgagtaaaattgagatgaataaggggc

SEQ ID NO: 12 - DNA, 1494 bp, Homo sapiens
gacactgtcccagctgccacctagactcggagctccatccaaacctccagcgaagacatcccaggtcgggtgaatcttccagccctgggggtggaggtagtaaaggccatggccatgcagaaaatctttgcccgggaaatcttggactccaggggcaaccccacggtggaggtggacctgcacacggccaagggccgattccgagcagctgtgcccagtggggcttccacgggtatctatgaggctctggaactaagagacggagacaaaggccgctacctggggaaaggagtcctgaaggctgtggagaacatcaacaatactctgggccctgctctgctgcaaaagaaactaagcgttgcggatcaagaaaaagttgacaaatttatgattgagctagatgggaccgagaataagtccaagtttggggccaatgccatcctgggcgtgtccttggccgtgtgtaaggcgggagcagctgagaagggggtccccctgtaccgccacatcgcagatctcgctgggaaccctgacctcatactcccagtgccagccttcaatgtgatcaacgggggctcccatgctggaaacaagctggccatgcaggagttcatgattctgcctgtgggagccagctccttcaaggaagccatgcgcattggcgccgaggtctaccaccacctcaagggggtcatcaaggccaagtatgggaaggatgccaccaatgtgggtgatgaaggtggcttcgcacccaacatcctggagaacaatgaggccctggagctgctgaagacggccatccaggcggctggttacccagacaaggtggtgatcggcatggatgtggcagcatctgagttctatcgcaatgggaagtacgatcttgacttcaagtcgcctgatgatcccgcacggcacatcactggggagaagctcggagagctgtataagagctttatcaagaactatcctgtggtctccatcgaagacccctttgaccaggatgactgggccacttggacctccttcctctcgggggtgaacatccagattgtgggggatgacttgacagtcaccaaccccaagaggattgcccaggccgttgagaagaaggcctgcaactgtctgctgctgaaggtcaaccagatcggctcggtgaccgaatcgatccaggcgtgcaaactggctcagtctaatggctggggggtgatggtgagccaccgctctggggagactgaggacacattcattgctgaccttgtggtggggctctgcacaggacagatcaagactggcgccccctgccgctcggagcgtctggccaaatacaaccaactcatgaggatcgaggaggctcttggggacaaggcaatctttgctggacgcaagttccgtaacccgaaggccaagtgagaagctggaggctccaggactccactggacagacccaggtcttccagacctgcttcctgaaataaacactggtgccaacca

SEQ ID NO: 13 - DNA, 2805 bp, Homo sapiens
cgggtctgatagtccctacctgtcaggactggtgttaggatgagataatgtttgtgaactgtaaacatatataaacgtgtgctactgtgagaactggaacaaagaagagagggagtgagagaaatcaagggagggctggggctgggaaagaacgaaaagggagtcgcgtatagaggagaggcgacagtcgcgagccacactttgcaatgaaactctttagactttctgccgggagagcggcccagacgcgccaggtctgtagcaggaggccgcgagggcgggtccccagaagcctacaggtgagtatcggttctccccttcccggctttcggtccggaggaggcgggagcagcttccctgttctgatcctatcgcgggcggcgcagggccggcttggccttccgtgggacggggaggggggcgggatgtgtcacccaaataccagtggggacggtcggtggtggaaccagccgggcaggtcgggtagagtataagagccggagggagcggccggggcgcagacgcctgcagaccatcccagacgccggagcccgagccccgacgagtccccgcgcctcatccgcccgcgtccggtccgcgttcctccgccccaccatggctcggggccccggcctcgcgccgccaccgctgcggctgccgctgctgctgctggtgctggcggcggtgaccggccacacggccgcgcaggacaactgcacgtgtcccaccaacaagatgaccgtgtgcagccccgacggccccggcggccgctgccagtgccgcgcgctgggctcgggcatggcggtcgactgctccacgctgacctccaagtgtctgctgctcaaggcgcgcatgagcgcccccaagaacgcccgcacgctggtgcggccgagtgagcacgcgctcgtggacaacgatggcctctacgaccccgactgcgaccccgagggccgcttcaaggcgcgccagtgcaaccagacgtcggtgtgctggtgcgtgaactcggtgggcgtgcgccgcacggacaagggcgacctgagcctacgctgcgatgagctggtgcgcacccaccacatcctcattgacctgcgccaccgccccaccgccggcgccttcaaccactcagacctggacgccgagctgaggcggctcttccgcgagcgctatcggctgcaccccaagttcgtggcggccgtgcactacgagcagcccaccatccagatcgagctgcggcagaacacgtctcagaaggccgccggtgaagtggatatcggcgatgccgcctactacttcgagagggacatcaagggcgagtctctattccagggccgcggcggcctggacttgcgcgtgcgcggagaacccctgcaggtggagcgcacgctcatctattacctggacgagattcccccgaagttctccatgaagcgcctcaccgccggcctcatcgccgtcatcgtggtggtcgtggtggccctcgtcgccggcatggccgtcctggtgatcaccaaccggagaaagtcggggaagtacaagaaggtggagatcaaggaactgggggagttgagaaaggaaccgagcttgtaggtacccggcggggcaggggatggggtggggtaccggatttcggtatcgtcccagacccaagtgagtcacgcttcctgattcctcggcgcaaaggagacgtttatcctttcaaattcctgccttccccctcccttttgcgcacacaccaggtttaatagatcctggcctcagggtctcctttctttctcacttctgtcttgagggaagcatttctaaaatgtatcccctttcggtccaacaacaggaaacctgactggggcagtgaaggaagggatggcacagcgttatgtgtaaaaaacaagtatctgtatgacaacccgggatcgtttgcaagtaactgaatccattgcgacattgtgaaggcttaaatgagtttagatgggaaatagcgttgttatcgccttgggtttaaattatttgatgagttccacttgtatcatggcctacccgaggagaagaggagtttgttaactgggcctatgtagtagcctcatttaccatcgtttgtattactgaccacatatgcttgtcactgggaaagaagcctgtttcagctgcctgaacgcagtttggatgtctttgaggacagacattgcccggaaactcagtctatttattcttcagcttgcccttactgccactgatattggtaatgttcttttttgtaaaatgtttgtacatatgttgtctttgataatgttgctgtaattttttaaaataaaacacgaatttaataaaatatgggaaaggcacaaaccagaagtcggcatttgtgaaaagtccctccagatttctatcactttggtctctaatttcccaagacttgtattttttttttatttcaaattataacacttttttttcccccagaagtgggtgtttcatgttgctactctggtgtgtcccaagatatcctaactggccagtgtaaatgctattctttctaaataagattatttggaaacttccttcaaactgcaggagggcgagctctgagggcacgagaagctaaaactagctgcttttgatgaaaaagagtgccagtctttggtcatctctaaacaaggcttatcaccaatggagacagaaaactctagttcaagagctgtacctcctttgaatcccagccctactcgaaataagtggtactatttccatttagcctttgagcaaatcacttaactcaaaggcgttgtggctctaagattaaacgacttt

SEQ ID NO: 14 - DNA, 1800 bp, Homo sapiens
atgggccccaagaggcgacagctgacgttccgggagaagtcacggatcatccaggaggtggaggagaatccggacctgcgcaagggcgagatcgcgcggcgcttcaacatcccgccgtccacgctgagcacgatcctgaagaacaagcgcgccatcctggcgtcggagcgcaagtacggggtggcctccacctgccgcaagaccaacaagctgtctccctacgacaagctcgagggcttgctcatcgcctggttccagcagatccgcgccgccggcctgccggtcaagggcatcatcctcaaggagaaggcgctgcgcatagccgaggagctgggcatggacgacttcaccgcctccaacggctggctggaccgcttccgccggcgccacggcgtggtgtcctgcagcggcgtggcccgcgcccgcgcgcgaaacgctgccccccgcaccccggcggcgcctgccagtccggccgcggtgccctcggagggcagtggcgggagcactactggttggcgcgctcgggaggagcagccgccgtcggtggccgagggctacgcctcgcaggacgtgttcagcgccaccgagaccagtctatggtacgacttcctgcccgaccaggccgcggggctgtgcggaggcgacggacggccgcgtcaagccacccagcgcctgagcgtcctgctatgcgccaatgccgacggcagcgagaagctgcccccgctggtggccggcaagtcggccaagccccgcgcaggccaagccggcctgccctgcgactacaccgccaactccaagggtggtgtcaccacccaggccctggccaagtacttgaaggccttggacacccgaatggctgcagagtctcgccgggtcctgctgttggccggccgcttggctgcccagtccttggacacctcgggcctgcggcatgtgcagctggccttcttccctcccggcaccgtgcatccgctggagaggggagtggtccagcaggtgaagggccactaccgccaggccatgctgctcaaggccatggccgcgctagagggccaggatccctcaggcctgcagctgggtctcacggaggccctgcactttgtggctgccgcctggcaggcagtggagccttcggacatagccgcctgctttcgtgaggctggctttgggggtggccctaatgccaccatcaccacttccctcaagagtgagggagaggaagaggaggaggaggaggaagaagaggaggaggaagagggtgaaggagaggaagaggaggaggaaggggaggaggaggaggaggaagggggggaaggagaggaattgggggaggaagaggaggtggaggaggagggtgatgttgatagtgatgaagaagaggaggaagatgaggagagctcctcggagggcttggaggctgaggactgggcccagggagtagtggaggccggtggcagcttcggggcttatggtgcccaggaggaagcccagtgccctactctgcatttcctggaaggtggggaggactctgattcagacagtgaggaagaggacgatgaggaagaggatgatgaagatgaagacgacgatgatgatgaggaggatggtgatgaggtgcctgtacccagctttggggaggccatggcttactttgccatggtcaagaggtacctgacctccttccccattgatgaccgcgtgcagagccacatcctccacttggaacacgatctggttcatgtgaccaggaagaaccacgccaggcaggcgggagttcgaggtcttggacatcaaagctga

SEQ ID NO: 15 - DNA, 3082 bp, Homo sapiens
atggaggccgctcatgctaaaaccacggaggaatgtttggcctattttggggtgagtgagaccacgggcctcaccccggaccaagttaagcggaatctggagaaatacggcctcaatgagctccctgctgaggaagggaagaccctgtgggagctggtgatagagcagtttgaagacctcctggtgcggattctcctcctggccgcatgcatttccttcgtgctggcctggtttgaggaaggtgaagagaccatcactgcctttgttgaaccctttgtcatcctcttgatcctcattgccaatgccatcgtgggggtttggcaggagcggaacgcagagaacgccatcgaggccctgaaggagtatgagccagagatggggaaggtctaccgggctgaccgcaagtcagtgcaaaggatcaaggctcgggacatcgtccctggggacatcgtggaggtggctgtgggggacaaagtccctgcagacatccgaatcctcgccatcaaatccaccacgctgcgggttgaccagtccatcctgacaggcgagtctgtatctgtcatcaaacacacggagcccgttcctgacccccgagctgtcaaccaggacaagaagaacatgcttttctcgggcaccaacattgcagccggcaaggccttgggcatcgtggccaccaccggtgtgggcaccgagattgggaagatccgagaccaaatggctgccacagaacaggacaagacccccttgcagcagaagctggatgagtttggggagcagctctccaaggtcatctccctcatctgtgtggctgtctggcttatcaacattggccacttcaacgaccccgtccatgggggctcctggttccgcggggccatctactactttaagattgccgtggccttggctgtggctgccatccccgaaggtcttcctgcagtcatcaccacctgcctggccctgggtacccgtcggatggcaaagaagaatgccattgtaagaagcttgccctccgtagagaccctgggctgcacctctgtcatctgttccgacaagacaggcaccctcaccaccaaccagatgtctgtctgcaagatgtttatcattgacaaggtggatggggacatctgcctcctgaatgagttctccatcaccggctccacttacgctccagagggagaggtcttgaagaatgataagccagtccggccagggcagtatgacgggctggtggagctggccaccatctgtgccctctgcaatgactcctccttggacttcaacgaggccaaaggtgtctatgagaaggtcggcgaggccaccgagacagcactcaccaccctggtggagaagatgaatgtgttcaacacggatgtgagaagcctctcgaaggtggagagagccaacgcctgcaactcggtgatccgccagctaatgaagaaggaattcaccctggagttctcccgagacagaaagtccatgtctgtctattgctccccagccaaatcttcccgggctgctgtgggcaacaagatgtttgtcaagggtgcccctgagggcgtcatcgaccgctgtaactatgtgcgagttggcaccacccgggtgccactgacggggccggtgaaggaaaagatcatggcggtgatcaaggagtggggcactggccgggacaccctgcgctgcttggccctggccacccgggacacccccccgaagcgagaggaaatggtcctggatgactctgccaggttcctggagtatgagacggacctgacattcgtgggtgtagtgggcatgctggaccctccgcgcaaggaggtcacgggctccatccagctgtgccgtgacgccgggatccgggtgatcatgatcactggggacaacaagggcacagccattgccatctgccggcgaattggcatctttggggagaacgaggaggtggccgatcgcgcctacacgggccgagagttcgacgacctgcccctggctgaacagcgggaagcctgccgacgtgcctgctgcttcgcccgtgtggagccctcgcacaagtccaagattgtggagtacctgcagtcctacgatgagatcacagccatgacaggtgatggcgtcaatgacgcccctgccctgaagaaggctgagattggcattgccatgggatctggcactgccgtggccaagactgcctctgagatggtgctggctgacgacaacttctccaccatcgtagctgctgtggaggagggccgcgccatctacaacaacatgaagcagttcatccgctacctcatttcctccaacgtgggcgaggtggtctgtatcttcctgaccgctgccctggggctgcctgaggccctgatcccggtgcagctgctatgggtgaacttggtgaccgacgggctcccagccacagccctgggcttcaacccaccagacctggacatcatggaccgccccccccggagccccaaggagcccctcatcagtggctggctcttcttccgctacatggcaatcgggggctatgtgggtgcagccaccgtgggagcagctgcctggtggttcctgtacgctgaggatgggcctcatgtcaactacagccagctgactcacttcatgcagtgcaccgaggacaacacccactttgagggcatagactgtgaggtcttcgaggcccccgagcccatgaccatggccctgtccgtgctggtgaccatcgagatgtgcaatgcactgaacagcctgtccgagaaccagtccctgctgcggatgccaccctgggtgaacatctggctgctgggctccatctgcctctccatgtccctgcacttcctcatcctctatgttgaccccctgccgatgatcttcaagctccgggccctggacctcacccagtggctcatggtcctcaagatctcactgccagtcattgggctcgacgaaatcctcaagttcgttgctcggaactacctagagggataactgttccccctcctccatctctgagcccgtgtcacagatccagaagatgaaagaaggaagtgagcatccttttgctctgtcctccccaccccgatag

SEQ ID NO: 16 - DNA, 738 bp, Homo sapiens
agtctcagattggtaaacacccgaactggtcaactctcaagagaccatctggttcaggttcctgactgggccagcgagtgaggatggccaggcctctggagcaggcggtagctgccatcgtgtgcaccttccaggaatacgcagggcgctgtggggacaaatacaagctctgccaggcggagctcaaggagctgctgcagaaggagctggccacctggaccccgactgagtttcgggaatgtgactacaacaaattcatgagtgttctggacaccaacaaggactgcgaggtggactttgtggagtatgtgcgctcacttgcctgcctctgtctctactgccacgagtacttcaaggactgcccctcagagcccccctgctcccagtagcctctgctccagggggtgcgctggctgtcgggggctgggcatgtctcccacaccccctcctaccctctctcctgtacccctttcaatctggacttgcccaggtcttctgcgatcagttaacccattttacctaggaggcccagagatgtgagggctccttcctcaggatgcccagcgaatgaggggtagagccactctggggcccagcctgcctgccgcacccctgtggcctcccttgtggatgggaggaggcgggatctgctctgaggccctcgaggctcagcagagcgtgcaccaatgagaccacgatgggaaagggcctatttaactcctaataaaaaactggcat

SEQ ID NO: 17 - DNA, 8974 bp, Homo sapiens
cagctgccacttttcaccgttagaagtagagctttttccagacctcctaccttttagtctactttgaaaggtgaaagaaagaacatcgtttcaggaataaaaatgcacagtagtagttatagttaccgtagcagtgattctgtgtttagtaacactaccagcactcgaaccagtcttgattcaaatgaaaatcttctcttggttcattgtggtccaacactgatcaactcttgcattagcttcggcagtgaatcctttgatggacacaggttagaaatgttgcaacagattgccaacagagttcagagggacagtgtcatctgtgaagacaaactgattcttgctggaaatgctcttcagtctgattctaaaagattagaatcaggagtgcagtttcagaatgaagcagaaattgctgggtatatacttgaatgtgagaaccttttacgccagcatgtaattgatgtacagattcttattgatggaaaatactaccaggcagatcaattggtacagagggttgcaaaactgcgtgacgaaattatggccttaaggaacgaatgttcttctgtgtacagcaaaggacgcatactgacaacagaacagacaaagctcatgatatcaggaatcactcaaagtttaaactcaggatttgcacagaccttacaccctagtctgacctcagggctgacccagagtttaacaccttccctaacctcttctagtatgacttctggcctgtcatcagggatgacttcccgcctgactccatctgtcactccagcttatacacctggtttcccatcaggattagttccaaatttcagttcaggagtagagccaaattcattgcaaactttgaagttgatgcagatccgaaaaccccttctaaagtcttctttgctggatcaaaatttaacagaagaagaaatcaatatgaaatttgttcaggatcttttgaattgggttgatgagatgcaggtacaactggaccgcactgagtggggctcagatttgccaagtgttgaaagccatttagaaaatcataaaaatgttcatagagctattgaagaatttgaatctagtctcaaagaagctaaaatcagtgagattcaaatgacagcacctcttaaactgacttatgcagaaaagttgcacagattagagagtcagtatgcaaaactcttgaatacatccaggaatcaagaacggcaccttgatacactccataattttgtaagtcgtgcgactaatgaacttatttggttgaatgaaaaagaagaggaggaagttgcttatgactggagtgagagaaacaccaacatagctaggaaaaaagattatcatgctgaattaatgagagaacttgatcaaaaggaagaaaatattaaatcagttcaggagatagcagagcagctacttctagaaaatcatccagcccggttaactattgaggcctacagagcggcaatgcagacgcagtggagctggatcttacagctctgccagtgtgtggagcagcacataaaggagaacacagcgtatttcgagtttttcaatgatgccaaagaagctactgattacttaaggaatctaaaagatgccattcagcggaagtacagctgtgatagatcaagcagcattcacaagctagaagaccttgttcaggaatcaatggaagagaaagaagaacttctgcagtacaaaagcactatagcaaacctaatgggaaaagcaaaaacaataattcaactgaagccaaggaattctgactgtccactcaaaacttctattccgatcaaagctatctgtgactacagacaaattgagataaccatttacaaagacgatgaatgtgttttggcgaataactctcatcgtgctaaatggaaggtcattagtcctactgggaatgaggctatggtcccatctgtgtgcttcaccgttcctccaccaaacaaagaagcggtggaccttgccaacagaattgagcaacagtatcagaatgtcctgactctttggcatgagtctcacataaacatgaagagtgtagtatcctggcattatctcatcaatgaaattgatagaattcgagctagcaatgtggcttcaataaagacaatgctacctggtgaacatcagcaagttctaagtaatctacaatctcgttttgaagattttctggaagatagccaggaatcccaagtcttttcaggctcagatataacacaactggaaaaggaggttaatgtatgtaagcagtattatcaagaacttcttaaatctgcagaaagagaggagcaagaggaatcagtttataatctctacatctctgaagttcgaaacattagacttcggttagagaactgtgaagatcggctgattagacagattcgaactcccctggaaagagatgatttgcatgaaagtgtgttcagaatcacagaacaggagaaactaaagaaagagctggaacgacttaaagatgatttgggaacaatcacaaataagtgtgaggagtttttcagtcaagcagcagcctcttcatcagtccctaccctacgatcagagcttaatgtggtccttcagaacatgaaccaagtctattctatgtcttccacttacatagataagttgaaaactgttaacttggtgttaaaaaacactcaagctgcagaagccctcgtaaaactctatgaaactaaactgtgtgaagaagaagcagttatagctgacaagaataatattgagaatctaataagtactttaaagcaatggagatctgaagtagatgaaaagagacaggtattccatgccttagaggatgagttgcagaaagctaaagccatcagtgatgaaatgtttaaaacgtataaagaacgggaccttgattttgactggcacaaagaaaaagcagatcaattagttgaaaggtggcaaaatgttcatgtgcagattgacaacaggttacgggacttagagggcattggcaaatcactgaagtactacagagacacttaccatcctttagatgattggatccagcaggttgaaactactcagagaaagattcaggaaaatcagcctgaaaatagtaaaaccctagccacacagttgaatcaacagaagatgctggtgtccgaaatagaaatgaaacagagcaaaatggacgagtgtcaaaaatatgcagaacagtactcagctacagtgaaggactatgaattacaaacaatgacctaccgggccatggtagattcacaacaaaaatctccagtgaaacgccgaagaatgcagagttcagcagatctcattattcaagagttcatggacctaaggactcgatatactgccctggtcactctcatgacacaatatattaaatttgctggtgattcattgaagaggctggaagaggaggagattaaaaggtgtaaggagacttctgaacatggggcatattcagatctgcttcagcgtcagaaggcaacagtgcttgagaatagcaaacttacaggaaagataagtgagttggaaagaatggtagctgaactaaagaaacaaaagtcccgagtagaggaagaacttccgaaggtcagggaggctgcagaaaatgaattgagaaagcagcagagaaatgtagaagatatctctctgcagaagataagggctgaaagtgaagccaagcagtaccgcagggaacttgaaaccattgtgagagagaaggaagccgctgaaagagaactggagcgggtgaggcagctcaccatagaggccgaggctaaaagagctgccgtggaagagaacctcctgaattttcgcaatcagttggaggaaaacacctttaccagacgaacactggaagatcatcttaaaagaaaagatttaagtctcaatgatttggagcaacaaaaaaataaattaatggaagaattaagaagaaagagagacaatgaggaagaactcttgaagctgataaagcagatggaaaaagaccttgcatttcagaaacaggtagcagagaaacagttgaaagaaaagcagaaaattgaattggaagcaagaagaaaaataactgaaattcagtatacatgtagagaaaatgcattgccagtgtgtccgatcacacaggctacatcatgcagggcagtaacgggtctccagcaagaacatgacaagcagaaagcagaagaactcaaacagcaggtagatgaactaacagctgccaatagaaaggctgaacaagacatgagagagctgacatatgaacttaatgccctccagcttgaaaaaacgtcatctgaggaaaaggctcgtttgctaaaagataaactagatgaaacaaataatacactcagatgccttaagttggagctggaaaggaaggatcaggcggagaaagggtattctcaacaactcagagagcttggtaggcaattgaatcaaaccacaggtaaagctgaagaagccatgcaagaagctagtgatctcaagaaaataaagcgcaattatcagttagaattagaatctcttaatcatgaaaaagggaaactacaaagagaagtagacagaatcacaagggcacatgctgtagctgagaagaatattcagcatttaaattcacaaattcattcttttcgagatgagaaagaattagaaagactacaaatctgccagagaaaatcagatcatctaaaagaacaatttgagaaaagccatgagcagttgcttcaaaatatcaaagctgaaaaagaaaataatgataaaatccaaaggctcaatgaagaattggagaaaagtaatgagtgtgcagagatgctaaaacaaaaagtagaggagcttactaggcagaataatgaaaccaaattaatgatgcagagaattcaggcagaatcagagaatatagttttagagaaacaaactatccagcaaagatgtgaagcactgaaaattcaggcagatggttttaaagatcagctacgcagcacaaatgaacacttgcataaacagacaaaaacagagcaggattttcaaagaaaaattaaatgcctagaagaagacctggcgaaaagtcaaaatttggtaagtgaatttaagcaaaagtgtgaccaacagaacattatcatccagaataccaagaaagaagttagaaatctgaatgcggaactgaatgcttccaaagaagagaagcgacgcggggagcagaaagttcagctacaacaagctcaggtgcaagagttaaataacaggttgaaaaaagtacaagacgaattacacttaaagaccatagaggagcagatgacccacagaaagatggttctgtttcaggaagaatctggtaaattcaaacaatcagcagaggagtttcggaagaagatggaaaaattaatggagtccaaagtcatcactgaaaatgatatttcaggcattaggcttgactttgtgtctcttcaacaagaaaactctagagcccaagaaaatgctaagctttgtgaaacaaacattaaagaacttgaaagacagcttcaacagtatcgtgaacaaatgcagcaagggcagcacatggaagcaaatcattaccaaaaatgtcagaaacttgaggatgagctgatagcccagaagcgtgaggttgaaaacctgaagcaaaaaatggaccaacagatcaaagagcatgaacatcaattagttttgctccagtgtgaaattcaaaaaaagagcacagccaaagactgtaccttcaaaccagattttgagatgacagtgaaggagtgccagcactctggagagctgtcctctagaaacactggacaccttcacccaacacccagatcccctctgttgagatggactcaagaaccacagccattggaagagaagtggcagcatcgggttgttgaacagatacccaaagaagtccaattccagccaccaggggctccactcgagaaagagaaaagccagcagtgttactctgagtacttttctcagacaagcaccgagttacagataacttttgatgagacaaaccccattacaagactgtctgaaattgagaagataagagaccaagccctgaacaattctagaccacctgttaggtatcaagataacgcatgtgaaatggaactggtgaaggttttgacacccttagagatagctaagaacaagcagtatgatatgcatacagaagtcacaacattaaaacaagaaaagaacccagttcccagtgctgaagaatggatgcttgaagggtgcagagcatctggtggactcaagaaaggggatttccttaagaagggcttagaaccagagaccttccagaactttgatggtgatcatgcatgttcagtcagggatgatgaatttaaattccaagggcttaggcacactgtgactgccaggcagttggtggaagctaagcttctggacatgagaacaattgagcagctgcgactcggtcttaagactgttgaagaagttcagaaaactcttaacaagtttctgacgaaagccacctcaattgcagggctttacctagaatctacaaaagaaaagatttcatttgcctcagcggccgagagaatcataatagacaaaatggtggctttggcatttttagaagctcaggctgcaacaggttttataattgatcccatttcaggtcagacatattctgttgaagatgcagttcttaaaggagttgttgaccccgaattcagaattaggcttcttgaggcagagaaggcagctgtgggatattcttattcttctaagacattgtcagtgtttcaagctatggaaaatagaatgcttgacagacaaaaaggtaaacatatcttggaagcccagattgccagtgggggtgtcattgaccctgtgagaggcattcgtgttcctccagaaattgctctgcagcaggggttgttgaataatgccatcttacagtttttacatgagccatccagcaacacaagagttttccctaatcccaataacaagcaagctctgtattactcagaattactgcgaatgtgtgtatttgatgtagagtcccaatgctttctgtttccatttggggagaggaacatttccaatctcaatgtcaagaaaacacatagaatttctgtagtagatactaaaacaggatcagaattgaccgtgtatgaggctttccagagaaacctgattgagaaaagtatatatcttgaactttcagggcagcaatatcagtggaaggaagctatgttttttgaatcctatgggcattcttctcatatgctgactgatactaaaacaggattacacttcaatattaatgaggctatagagcagggaacaattgacaaagccttggtcaaaaagtatcaggaaggcctcatcacacttacagaacttgctgattctttgctgagccggttagtccccaagaaagatttgcacagtcctgttgcagggtattggctgactgctagtggggaaaggatctctgtactaaaagcctcccgtagaaatttggttgatcggattactgccctccgatgccttgaagcccaagtcagtacagggggcataattgatcctcttactggcaaaaagtaccgggtggccgaagctttgcatagaggcctggttgatgaggggtttgcccagcagctgcgacagtgtgaattagtaatcacagggattggccatcccatcactaacaaaatgatgtcagtggtggaagctgtgaatgcaaatattataaataaggaaatgggaatccgatgtttggaatttcagtacttgacaggagggttgatagagccacaggttcactctcggttatcaatagaagaggctctccaagtaggtattatagatgtcctcattgccacaaaactcaaagatcaaaagtcatatgtcagaaatataatatgccctcagacaaaaagaaagttgacatataaagaagccttagaaaaagctgattttgatttccacacaggacttaaactgttagaagtatctgagcccctgatgacaggaatttctagcctctactattcttcctaatgggacatgtttaaataactgtgcaaggggtgatgcaggctggttcatgccactttttcagagtatgatgatatcggctacatatgcagtctgtgaattatgtaacatactctatttcttgagggctgcaaattgctaagtgctcaaaatagagtaagttttaaattgaaaattacataagatttaatgcccttcaaatggtttcatttagccttgagaatggttttttgaaacttggccacactaaaatgtttttttttttacgtagaatgtgggataaacttgatgaactccaagttcacagtgtcatttcttcagaactccccttcattgaatagtgatcatttattaaatgataaattgcactcgctgaaagagcacgtcatgaagcaccatggaatcaaagagaaagatataaattcgttcccacagccttcaagctgcagtgttttagattgcttcaaaaaatgaaaaagttttgcctttttctgtatatagtgaccttctttgcatattaaaatgtttaccacaatgtcccatttctagttaagtcttcgcacttgaaagctaacattatgaatattatgtgttggaggaggggaaggattttcttcattctgtgtattttccggttacatgtacagtagacgttctctattctatcagccttctatggtacctttttgtcaggacaattaggattgtaatgctaatgcaaaggcagcaattcaaagatcttctagtgcctcatgaataaagttgagatttaaaatttgtaacattgatggaacagctgggaggttagaccaatcattaaggaatgtatgccatagctttctttgctaccataaacattttggaggtgcatctgctatgtgacatggtaaatatggttaagtgaatgaataaaatgttttagtaa

SEQ ID NO: 18 - DNA, 2036 bp, Homo sapiens
tttcctctttctctaagagtctctctctccctttccctctctctccccccaatctgtctttctagcatgttgccctttttcaaccacatttgtgtttcaggtgtagagaggagagagagtgaacagggagcggggcttttgtctgttggtctccctggactgaagagagggagaatagaagcccaagactaagattctcaaaatggtttattacccagaactctttgtctgggtcagtcaagaaccatttccaaacaaggacatggagggaaggcttcctaagggaagacttcctgtcccaaaggaagtgaaccgcaagaagaacgatgagacaaacgctgcctccctgactccactgggcagcagtgaactccgctccccaagaatcagttacctccactttttttaatcgtaacacctccatttgtattacatatggtgtatgggtattgatgaggtcatggtatcatatatgggatttttttctgtgtaaatcatcaagtataagaagaaactatgggactctgagccttgctttagagaatttacagtggacaaataggtgtcatcaaaccagtttttaatcattctgactcaagtgaaaacgctcagaatttcacactgtgaatccacgtttacaacccttacaggtgggccttcaggcctggttcgctacaacaatgtcttccacaactcaaactcccaccgcgctcacacaaccggtccactcctgccttttcactcacacagctcccgactgcttcttgcagaggctgagagtccccccccccacctttttttttcatttagatgtaacaaacctagtagtttatgttcatcaattgtctgtatatctctatattttatccatgtactcttttgatgtatagaagtagtttgaaactcattgtttccttgtggtaagtgaccgagatgctgccacaggacctgagacactgatgaatggtgctattttggactttcaacatgctccttggcgaggtagctctgatggagttattttttatttccatgttctaagaaggtgttggtactctgtttccctgaatgttgttctctagactggattgacttgttttccttgtgtcttcagtgtggctttcttcctcagtgttgtaggttgagcgaatgctaccagagtgtgagagaccattgtctcgttggctggcgctcacggacatgcagtcacggtagcgggagcaatcacaaaactgtaatttacttaccaaatctcttcctttccgtagcctcgcctgcctgacttagagaaagaaaagcaataattttacaggcattttgaggtgtctctttgggttctttctgtttgaaaggatatttgtcgaaaaaaagagcaaaaccgttttaaataaactccccctggaaaaaaacccaaaacactggcatctgagtaggaatatgaaaatgacaccttttccaaatattaaattggaaaacaaggtctacaaaatcatgatacttttttaaaaggcagagcattcttttttcggcaattttgataagcaaggtgtagatttacatttttgtccttgctcccaacgaaatggataaacaaaaataaattaccatctactcatggaatgttgttgtgttagccagtctgaaagcccaccttaatttttatataactgtctttagctcttcttttgacagggcaggccttgttctgaactgtttcgcttctgactgttaaacaccgatgacgcatgcactgcacttcttcgttttcttcttgctcccccattggcctgagtttcttgtgcattactcctctccctccttcgttagaataggtatatcagctgtgtaaatagagcaagaaaacagtattctgcatctgtggcatttatgtagagttgcagttgtgtactgctgaaaatgcaggcttttgtaacagtgtgatctttactgatgcactcatgacaagtacccaatgtattttagctattttagtagtatttgttcaataaatacgcaagctgtaaggtaactgtctg

SEQ ID NO: 19 - DNA, 887 bp, Homo sapiens
tctttggtgacttgtccactccagtgtggcatcatgtggcagctgctcctcccaactgctctgctacttctagtttcagctggcatgcggactgaagatctcccaaaggctgtggtgttcctggagcctcaatggtacagcgtgcttgagaaggacagtgtgactctgaagtgccagggagcctactcccctgaggacaattccacacagtggtttcacaatgagagcctcatctcaagccaggcctcgagctacttcattgacgctgccacagtcaacgacagtggagagtacaggtgccagacaaacctctccaccctcagtgacccggtgcagctagaagtccatatcggctggctgttgctccaggcccctcggtgggtgttcaaggaggaagaccctattcacctgaggtgtcacagctggaagaacactgctctgcataaggtcacatatttacagaatggcaaagacaggaagtattttcatcataattctgacttccacattccaaaagccacactcaaagatagcggctcctacttctgcagggggcttgttgggagtaaaaatgtgtcttcagagactgtgaacatcaccatcactcaaggtttggcagtgtcaaccatctcatcattctctccacctgggtaccaagtctctttctgcttggtgatggtactcctttttgcagtggacacaggactatatttctctgtgaagacaaacatttgaagctcaacaagagactggaaggaccataaacttaaatggagaaaggaccctcaagacaaatgacccccatcccatgggagtaataagagcagtggcagcagcatctctgaacatttctctggatttgcaaccccatcatcctcaggcctctc

SEQ ID NO: 20 - DNA, 1176 bp, Homo sapiens
agacaccgtgtcctcttgcctgggagaggggaagcagatctgaggacatctctgtgccaggccagaaaccgcccacctgcaggtgaggcccggacccctgcccagttccttctccgggatggacgtggggcccagctccctgccccaccttgggctgaagctgctgctgctcctgctgctgctgcccctcaggggccaagccaacacaggctgctacgggatcccagggatgcccggcctgcccggggcaccagggaaggatgggtacgacggactgccggggcccaagggggagccaggaatcccagccattcccgggatccgaggacccaaagggcagaagggagaacccggcttacccggccatcctgggaaaaatggccccatgggaccccctgggatgccaggggtgcccggccccatgggcatccctggagagccaggtgaggagggcagatacaagcagaaattccagtcagtgttcacggtcactcggcagacccaccagccccctgcacccaacagcctgatcagattcaacgcggtcctcaccaacccgcagggagattatgacacgagcactggcaagttcacctgcaaagtccccggcctctactactttgtctaccacgcgtcgcatacagccaacctgtgcgtgctgctgtaccgcagcggcgtcaaagtggtcaccttctgtggccacacgtccaaaaccaatcaggtcaactcgggcggtgtgctgctgaggttgcaggtgggcgaggaggtgtggctggctgtcaatgactactacgacatggtgggcatccagggctctgacagcgtcttctccggcttcctgctcttccccgactagggcgggcagatgcgctcgagacccacgggccttccacctccctcagcttcctgcatggacccaccttactggccagtctgcatccttgcctagaccattctccccaccagatggacttctcctccagggagcccaccctgacccacccccactgcaccccctccccatgggttctctccttcctctgaacttctttaggagtcactgcttgtgtggttcctgggacacttaaccaatgccttctggtactgccattcttttttttttttttcaagtattggaaggggtggggagatatataaataaatcatgaaatcaat

SEQ ID NO: 21 - DNA, 1505 bp, Homo sapiens
gctggtcggaggctcgcagtgctgtcggcgagaagcagtcgggtttggagcgcttgggtcgcgttggtgcgcggtggaacgcgcccagggaccccagttcccgcgagcagctccgcgccgcgcctgagagactaagctgaaactgctgctcagctcccaagatggtgccacccaaattgcatgtgcttttctgcctctgcggctgcctggctgtggtttatccttttgactggcaatacataaatcctgttgcccatatgaaatcatcagcatgggtcaacaaaatacaagtactgatggctgctgcaagctttggccaaactaaaatcccccggggaaatgggccttattccgttggttgtacagacttaatgtttgatcacactaataagggcaccttcttgcgtttatattatccatcccaagataatgatcgccttgacaccctttggatcccaaataaagaatatttttggggtcttagcaaatttcttggaacacactggcttatgggcaacattttgaggttactctttggttcaatgacaactcctgcaaactggaattcccctctgaggcctggtgaaaaatatccacttgttgttttttctcatggtcttggggcattcaggacactttattctgctattggcattgacctggcatctcatgggtttatagttgctgctgtagaacacagagatagatctgcatctgcaacttactatttcaaggaccaatctgctgcagaaataggggacaagtcttggctctaccttagaaccctgaaacaagaggaggagacacatatacgaaatgagcaggtacggcaaagagcaaaagaatgttcccaagctctcagtctgattcttgacattgatcatggaaagccagtgaagaatgcattagatttaaagtttgatatggaacaactgaaggactctattgatagggaaaaaatagcagtaattggacattcttttggtggagcaacggttattcagactcttagtgaagatcagagattcagatgtggtattgccctggatgcatggatgtttccactgggtgatgaagtatattccagaattcctcagcccctcttttttatcaactctgaatatttccaatatcctgctaatatcataaaaatgaaaaaatgctactcacctgataaagaaagaaagatgattacaatcaggggttcagtccaccagaattttgctgacttcacttttgcaactggcaaaataattggacacatgctcaaattaaagggagacatagattcaaatgtagctattgatcttagcaacaaagcttcattagcattcttacaaaagcatttaggacttcataaagattttgatcagtgggactgcttgattgaaggagatgatgagaatcttattccagggaccaacattaacacaaccaatcaacacatcatgttacagaactcttcaggaatagagaaatacaattaggattaaaataggtttttt

SEQ ID NO: 22 - DNA, 1504 bp, Homo sapiens
aatagccccggatatctgtgttaccagccttgtctcggccacctcaaggataatcactaaattctgccgaaaggactgaggaacggtgcctggaaaagggcaagaatatcacggcatgggcatgagtagcttgaaactgctgaagtatgtcctgtttttcttcaacttgctcttttggatctgtggctgctgcattttgggctttgggatctacctgctgatccacaacaacttcggagtgctcttccataacctcccctccctcacgctgggcaatgtgtttgtcatcgtgggctctattatcatggtagttgccttcctgggctgcatgggctctatcaaggaaaacaagtgtctgcttatgtcgttcttcatcctgctgctgattatcctccttgctgaggtgaccttggccatcctgctctttgtatatgaacagaagctgaatgagtatgtggctaagggtctgaccgacagcatccaccgttaccactcagacaatagcaccaaggcagcgtgggactccatccagtcatttctgcagtgttgtggtataaatggcacgagtgattggaccagtggcccaccagcatcttgcccctcagatcgaaaagtggagggttgctatgcgaaagcaagactgtggtttcattccaatttcctgtatatcggaatcatcaccatctgtgtatgtgtgattgaggtgttggggatgtcctttgcactgaccctgaactgccagattgacaaaaccagccagaccatagggctatgatctgcagtagttctgtggtgaagagacttgtttcatctccggaaatgcaaaaccatttatagcatgaagccctacatgatcactgcaggatgatcctcctcccatcctttccctttttaggtccctgtcttatacaaccagagaagtgggtgttggccaggcacatcccatctcaggcagcaagacaatctttcactcactgacggcagcagccatgtctctcaaagtggtgaaactaatatctgagcatcttttagacaagagaggcaaagacaaactggatttaatggcccaacatcaaagggtgaacccaggatatgaatttttgcatcttcccattgtcgaattagtctccagcctctaaataatgcccagtcttctccccaaagtcaagcaagagactagttgaagggagttctggggccaggctcactggaccattgtcacaaccctctgtttctctttgactaagtgccctggctacaggaattacacagttctctttctccaaagggcaagatctcatttcaatttctttattagagggccttattgatgtgttctaagtctttccagaaaaaaactatccagtgatttatatcctgatttcaaccagtcacttagctgataatcacagtaagaagacttctggtattatctctctatcagataagattttgttaatgtactattttactcttcaataaataaaacagtttattatctcaa

SEQ ID NO: 23 - DNA, 4910 bp, Homo sapiens
tagacgcaccctctgaagatggtgactccctcctgagaagctggaccccttggtaaaagacaaggccttctccaagaagaatatgaaagtgttactcagacttatttgtttcatagctctactgatttcttctctggaggctgataaatgcaaggaacgtgaagaaaaaataattttagtgtcatctgcaaatgaaattgatgttcgtccctgtcctcttaacccaaatgaacacaaaggcactataacttggtataaagatgacagcaagacacctgtatctacagaacaagcctccaggattcatcaacacaaagagaaactttggtttgttcctgctaaggtggaggattcaggacattactattgcgtggtaagaaattcatcttactgcctcagaattaaaataagtgcaaaatttgtggagaatgagcctaacttatgttataatgcacaagccatatttaagcagaaactacccgttgcaggagacggaggacttgtgtgcccttatatggagttttttaaaaatgaaaataatgagttacctaaattacagtggtataaggattgcaaacctctacttcttgacaatatacactttagtggagtcaaagataggctcatcgtgatgaatgtggctgaaaagcatagagggaactatacttgtcatgcatcctacacatacttgggcaagcaatatcctattacccgggtaatagaatttattactctagaggaaaacaaacccacaaggcctgtgattgtgagcccagctaatgagacaatggaagtagacttgggatcccagatacaattgatctgtaatgtcaccggccagttgagtgacattgcttactggaagtggaatgggtcagtaattgatgaagatgacccagtgctaggggaagactattacagtgtggaaaatcctgcaaacaaaagaaggagtaccctcatcacagtgcttaatatatcggaaattgaaagtagattttataaacatccatttacctgttttgccaagaatacacatggtatagatgcagcatatatccagttaatatatccagtcactaatttccagaagcacatgattggtatatgtgtcacgttgacagtcataattgtgtgttctgttttcatctataaaatcttcaagattgacattgtgctttggtacagggattcctgctatgattttctcccaataaaagcttcagatggaaagacctatgacgcatatatactgtatccaaagactgttggggaagggtctacctctgactgtgatatttttgtgtttaaagtcttgcctgaggtcttggaaaaacagtgtggatataagctgttcatttatggaagggatgactacgttggggaagacattgttgaggtcattaatgaaaacgtaaagaaaagcagaagactgattatcattttagtcagagaaacatcaggcttcagctggctgggtggttcatctgaagagcaaatagccatgtataatgctcttgttcaggatggaattaaagttgtcctgcttgagctggagaaaatccaagactatgagaaaatgccagaatcgattaaattcattaagcagaaacatggggctatccgctggtcaggggactttacacagggaccacagtctgcaaagacaaggttctggaagaatgtcaggtaccacatgccagtccagcgacggtcaccttcatctaaacaccagttactgtcaccagccactaaggagaaactgcaaagagaggctcacgtgcctctcgggtagcatggagaagttgccaagagttctttaggtgcctcctgtcttatggcgttgcaggccaggttatgcctcatgctgacttgcagagttcatggaatgtaactatatcatcctttatccctgaggtcacctggaatcagattattaagggaataagccatgacgtcaatagcagcccagggcacttcagagtagagggcttgggaagatcttttaaaaaggcagtaggcccggtgtggtggctcacgcctataatcccagcactttgggaggctgaagtgggtggatcaccagaggtcaggagttcgagaccagcccagccaacatggcaaaaccccatctctactaaaaatacaaaaatgagctaggcatggtggcacacgcctgtaatcccagctacacctgaggctgaggcaggagaattgcttgaaccggggagacggaggttgcagtgagccgagtttgggccactgcactctagcctggcaacagagcaagactccgtctcaaaaaaagggcaataaatgccctctctgaatgtttgaactgccaagaaaaggcatggagacagcgaactagaagaaagggcaagaaggaaatagccaccgtctacagatggcttagttaagtcatccacagcccaagggcggggctatgccttgtctggggaccctgtagagtcactgaccctggagcggctctcctgagaggtgctgcaggcaaagtgagactgacacctcactgaggaagggagacatattcttggagaactttccatctgcttgtattttccatacacatccccagccagaagttagtgtccgaagaccgaattttattttacagagcttgaaaactcacttcaatgaacaaagggattctccaggattccaaagttttgaagtcatcttagctttccacaggagggagagaacttaaaaaagcaacagtagcagggaattgatccacttcttaatgctttcctccctggcatgaccatcctgtcctttgttattatcctgcattttacgtctttggaggaacagctccctagtggcttcctccgtctgcaatgtcccttgcacagcccacacatgaaccatccttcccatgatgccgctcttctgtcatcccgctcctgctgaaacacctcccaggggctccacctgttcaggagctgaagcccatgctttcccaccagcatgtcactcccagaccacctccctgccctgtcctccagcttcccctcgctgtcctgctgtgtgaattcccaggttggcctggtggccatgtcgcctgcccccagcactcctctgtctctgctcttgcctcgacccttcctcctcctttgcctaggaggccttctcgcattttctctagctgatcagaattttaccaaaattcagaacatcctccaattccacagtctctgggagactttccctaagaggcgacttcctctccagccttctctctctggtcaggcccactgcagagatggtggtgagcacatctgggaggctggtctccctccagctggaattgctgctctctgagggagaggctgtggtggctgtctctgtccctcactgccttccaggagcaatttgcacatgtaacatagatttatgtaatgctttatgtttaaaaacattccccaattatcttatttaatttttgcaattattctaattttatatatagagaaagtgacctattttttaaaaaaatcacactctaagttctattgaacctaggacttgagcctccatttctggcttctagtctggtgttctgagtacttgatttcaggtcaataacggtcccccctcactccacactggcacgtttgtgagaagaaatgacattttgctaggaagtgaccgagtctaggaatgcttttattcaagacaccaaattccaaacttctaaatgttggaattttcaaaaattgtgtttagattttatgaaaaactcttctactttcatctattctttccctagaggcaaacatttcttaaaatgtttcattttcattaaaaatgaaagccaaatttatatgccaccgattgcaggacacaagcacagttttaagagttgtatgaacatggagaggacttttggtttttatatttctcgtatttaatatgggtgaacaccaacttttatttggaataataattttcctcctaaacaaaaacacattgagtttaagtctctgactcttgcctttccacctgctttctcctgggcccgctttgcctgcttgaaggaacagtgctgttctggagctgctgttccaacagacagggcctagctttcatttgacacacagactacagccagaagcccatggagcagggatgtcacgtcttgaaaagcctattagatgttttacaaatttaattttgcagattattttagtctgtcatccagaaaatgtgtcagcatgcatagtgctaagaaagcaagccaatttggaaacttaggttagtgacaaaattggccagagagtgggggtgatgatgaccaagaattacaagtagaatggcagctggaatttaaggagggacaagaatcaatggataagcgtgggtggaggaagatccaaacagaaaagtgcaaagttattccccatcttccaagggttgaattctggaggaagaagacacattcctagttccccgtgaacttcctttgacttattgtccccactaaaacaaaacaaaaaacttttaatgccttccacattaattagattttcttgcagtttttttatggcatttttttaaagatgccctaagtgttgaagaagagtttgcaaatgcaacaaaaatatttaattaccggttgttaaaactggtttagcacaatttatattttccctctcttgcctttcttatttgcaataaaaggtattgagccattttttaaatgacatttttgataaattatgtttgtactagttgatgaaggagttttttttaacctgtttatataattttgcagcagaagccaaattttttgtatattaaagcaccaaattcatgtacagcatgcatcacggatcaatagactgtacttattttccaataaaattttcaaactttgtactgttaaa

SEQ ID NO: 24 - DNA, 3597 bp, Homo sapiens
ggcgaatggagcaggggcgcgcagataattaaagatttacacacagctggaagaaatcatagagaagccgggcgtggtggctcatgcctataatcccagcacttttggaggctgaggcgggcagatcacttgagatcaggagttcgagaccagcctggtgccttggcatctcccaatggggtggctttgctctgggctcctgttccctgtgagctgcctggtcctgctgcaggtggcaagctctgggaacatgaaggtcttgcaggagcccacctgcgtctccgactacatgagcatctctacttgcgagtggaagatgaatggtcccaccaattgcagcaccgagctccgcctgttgtaccagctggtttttctgctctccgaagcccacacgtgtatccctgagaacaacggaggcgcggggtgcgtgtgccacctgctcatggatgacgtggtcagtgcggataactatacactggacctgtgggctgggcagcagctgctgtggaagggctccttcaagcccagcgagcatgtgaaacccagggccccaggaaacctgacagttcacaccaatgtctccgacactctgctgctgacctggagcaacccgtatccccctgacaattacctgtataatcatctcacctatgcagtcaacatttggagtgaaaacgacccggcagatttcagaatctataacgtgacctacctagaaccctccctccgcatcgcagccagcaccctgaagtctgggatttcctacagggcacgggtgagggcctgggctcagtgctataacaccacctggagtgagtggagccccagcaccaagtggcacaactcctacagggagcccttcgagcagcacctcctgctgggcgtcagcgtttcctgcattgtcatcctggccgtctgcctgttgtgctatgtcagcatcaccaagattaagaaagaatggtgggatcagattcccaacccagcccgcagccgcctcgtggctataataatccaggatgctcaggggtcacagtgggagaagcggtcccgaggccaggaaccagccaagtgcccacactggaagaattgtcttaccaagctcttgccctgttttctggagcacaacatgaaaagggatgaagatcctcacaaggctgccaaagagatgcctttccagggctctggaaaatcagcatggtgcccagtggagatcagcaagacagtcctctggccagagagcatcagcgtggtgcgatgtgtggagttgtttgaggccccggtggagtgtgaggaggaggaggaggtagaggaagaaaaagggagcttctgtgcatcgcctgagagcagcagggatgacttccaggagggaagggagggcattgtggcccggctaacagagagcctgttcctggacctgctcggagaggagaatgggggcttttgccagcaggacatgggggagtcatgccttcttccaccttcgggaagtacgagtgctcacatgccctgggatgagttcccaagtgcagggcccaaggaggcacctccctggggcaaggagcagcctctccacctggagccaagtcctcctgccagcccgacccagagtccagacaacctgacttgcacagagacgcccctcgtcatcgcaggcaaccctgcttaccgcagcttcagcaactccctgagccagtcaccgtgtcccagagagctgggtccagacccactgctggccagacacctggaggaagtagaacccgagatgccctgtgtcccccagctctctgagccaaccactgtgccccaacctgagccagaaacctgggagcagatcctccgccgaaatgtcctccagcatggggcagctgcagcccccgtctcggcccccaccagtggctatcaggagtttgtacatgcggtggagcagggtggcacccaggccagtgcggtggtgggcttgggtcccccaggagaggctggttacaaggccttctcaagcctgcttgccagcagtgctgtgtccccagagaaatgtgggtttggggctagcagtggggaagaggggtataagcctttccaagacctcattcctggctgccctggggaccctgccccagtccctgtccccttgttcacctttggactggacagggagccacctcgcagtccgcagagctcacatctcccaagcagctccccagagcacctgggtctggagccgggggaaaaggtagaggacatgccaaagcccccacttccccaggagcaggccacagacccccttgtggacagcctgggcagtggcattgtctactcagcccttacctgccacctgtgcggccacctgaaacagtgtcatggccaggaggatggtggccagacccctgtcatggccagtccttgctgtggctgctgctgtggagacaggtcctcgccccctacaacccccctgagggccccagacccctctccaggtggggttccactggaggccagtctgtgtccggcctccctggcaccctcgggcatctcagagaagagtaaatcctcatcatccttccatcctgcccctggcaatgctcagagctcaagccagacccccaaaatcgtgaactttgtctccgtgggacccacatacatgagggtctcttaggtgcatgtcctcttgttgctgagtctgcagatgaggactagggcttatccatgcctgggaaatgccacctcctggaaggcagccaggctggcagatttccaaaagacttgaagaaccatggtatgaaggtgattggccccactgacgttggcctaacactgggctgcagagactggaccccgcccagcattgggctgggctcgccacatcccatgagagtagagggcactgggtcgccgtgccccacggcaggcccctgcaggaaaactgaggcccttgggcacctcgacttgtgaacgagttgttggctgctccctccacagcttctgcagcagactgtccctgttgtaactgcccaaggcatgttttgcccaccagatcatggcccacgtggaggcccacctgcctctgtctcactgaactagaagccgagcctagaaactaacacagccatcaagggaatgacttgggcggccttgggaaatcgatgagaaattgaacttcagggagggtggtcattgcctagaggtgctcattcatttaacagagcttccttaggttgatgctggaggcagaatcccggctgtcaaggggtgttcagttaaggggagcaacagaggacatgaaaaattgctatgactaaagcagggacaatttgctgccaaacacccatgcccagctgtatggctgggggctcctcgtatgcatggaacccccagaataaatatgctcagccaccctgtgggccgggcaatccagacagcaggcataaggcaccagttaccctgcatgttggcccagacctcaggtgctagggaaggcgggaaccttgggttgagtaatgctcgtctgtgtgttttagtttcatcacctgttatctgtgtttgctgaggagagtggaacagaaggggtggagttttgtataaataaagtttctttgtctc

SEQ ID NO: 25 - DNA, 1722 bp, Homo sapiens
gcgggcggttcagccatgaggctggctgtgcttttctcgggggccctgctggggctactggcagcccaggggacagggaatgactgtcctcacaaaaaatcagctactttgctgccatccttcacggtgacacccacggttacagagagcactggaacaaccagccacaggactaccaagagccacaaaaccaccactcacaggacaaccaccacaggcaccaccagccacggacccacgactgccactcacaaccccaccaccaccagccatggaaacgtcacagttcatccaacaagcaatagcactgccaccagccagggaccctcaactgccactcacagtcctgccaccactagtcatggaaatgccacggttcatccaacaagcaacagcactgccaccagcccaggattcaccagttctgcccacccagaaccacctccaccctctccgagtcctagcccaacctccaaggagaccattggagactacacgtggaccaatggttcccagccctgtgtccacctccaagcccagattcagattcgagtcatgtacacaacccagggtggaggagaggcctggggcatctctgtactgaaccccaacaaaaccaaggtccagggaagctgtgagggtgcccatccccacctgcttctctcattcccctatggacacctcagctttggattcatgcaggacctccagcagaaggttgtctacctgagctacatggcggtggagtacaatgtgtccttcccccacgcagcaaagtggacattctcggctcagaatgcatcccttcgagatctccaagcacccctggggcagagcttcagttgcagcaactcgagcatcattctttcaccagctgtccacctcgacctgctctccctgaggctccaggctgctcagctgccccacacaggggtctttgggcaaagtttctcctgccccagtgaccggtccatcttgctgcctctcatcatcggcctgatccttcttggcctcctcgccctggtgcttattgctttctgcatcatccggagacgcccatccgcctaccaggccctctgagcatttgcttcaaaccccagggcactgagggggtttggggtgtggtgggggggtacccttatttcctcgacacgccgctggctcaaagacaatgttattttccttccctttcttgaagaacaaaaagaaagccgggcatgacggctcatgcctgtaatcccagcactttgggaggctgaggcaggtggatcactggaggtcaggtctttgaggccagccctagccaacatggtgtaaacactgtctctactaaaaatacaattagccaggtgtggcggcgtaatcccatgctaacctgtaatcccagctacttgggaggctgaggcagagctgcttgaaccctggaagtggaggttgcagtgagcctgtcatcgctccactgagccaagatcgctcccactgcactccagcctgggcgacagagccagactgtctcaaataaataaatatgagataatgcagtcgggagaagggagggagagaattttattaaatgtgacgaactgcccccccccccccccccagcaggagagcagcaaaatttatgtaaatctttgacggggttttccttgctcctgccaggattaaaagtccatgagtttcttgctcaaaaaaaaaaaaaaaaaaaaaaaaaaaaaaaaa

SEQ ID NO: 26 - DNA, 2273 bp, Homo sapiens
caggactgcctgagacaagccacaagctgaacagagaaagtggattgaacaaggacgcatttccccagtacatccacaacatgctgtccacatctcgttctcggtttatcagaaataccaacgagagcggtgaagaagtcaccaccttttttgattatgattacggtgctccctgtcataaatttgacgtgaagcaaattggggcccaactcctgcctccgctctactcgctggtgttcatctttggttttgtgggcaacatgctggtcgtcctcatcttaataaactgcaaaaagctgaagtgcttgactgacatttacctgctcaacctggccatctctgatctgctttttcttattactctcccattgtgggctcactctgctgcaaatgagtgggtctttgggaatgcaatgtgcaaattattcacagggctgtatcacatcggttattttggcggaatcttcttcatcatcctcctgacaatcgatagatacctggctattgtccatgctgtgtttgctttaaaagccaggacggtcacctttggggtggtgacaagtgtgatcacctggttggtggctgtgtttgcttctgtcccaggaatcatctttactaaatgccagaaagaagattctgtttatgtctgtggcccttattttccacgaggatggaataatttccacacaataatgaggaacattttggggctggtcctgccgctgctcatcatggtcatctgctactcgggaatcctgaaaaccctgcttcggtgtcgaaacgagaagaagaggcatagggcagtgagagtcatcttcaccatcatgattgtttactttctcttctggactccctataacattgtcattctcctgaacaccttccaggaattcttcggcctgagtaactgtgaaagcaccagtcaactggaccaagccacgcaggtgacagagactcttgggatgactcactgctgcatcaatcccatcatctatgccttcgttggggagaagttcagaagcctttttcacatagctcttggctgtaggattgccccactccaaaaaccagtgtgtggaggtccaggagtgagaccaggaaagaatgtgaaagtgactacacaaggactcctcgatggtcgtggaaaaggaaagtcaattggcagagcccctgaagccagtcttcaggacaaagaaggagcctagagacagaaatgacagatctctgctttggaaatcacacgtctggcttcacagatgtgtgattcacagtgtgaatcttggtgtctacgttaccaggcaggaaggctgagaggagagagactccagctgggttggaaaacagtattttccaaactaccttccagttcctcatttttgaatacaggcatagagttcagactttttttaaatagtaaaaataaaattaaagctgaaaactgcaacttgtaaatgtggtaaagagttagtttgagttgctatcatgtcaaacgtgaaaatgctgtattagtcacagagataattctagctttgagcttaagaattttgagcaggtggtatgtttgggagactgctgagtcaacccaatagttgttgattggcaggagttggaagtgtgtgatctgtgggcacattagcctatgtgcatgcagcatctaagtaatgatgtcgtttgaatcacagtatacgctccatcgctgtcatctcagctggatctccattctctcaggcttgctgccaaaagccttttgtgttttgttttgtatcattatgaagtcatgcgtttaatcacattcgagtgtttcagtgcttcgcagatgtccttgatgctcatattgttccctaatttgccagtgggaactcctaaatcaaattggcttctaatcaaagcttttaaaccctattggtaaagaatggaaggtggagaagctccctgaagtaagcaaagactttcctcttagtcgagccaagttaagaatgttcttatgttgcccagtgtgtttctgatctgatgcaagcaagaaacactgggcttctagaaccaggcaacttgggaactagactcccaagctggactatggctctactttcaggccacatggctaaagaaggtttcagaaagaagtggggacagagcagaactttcaccttcatatatttgtatgatcctaatgaatgcataaaatgttaagttgatggtgatgaaatgtaaatactgtttttaacaactatgatttggaaaataaatcaatgctataactatgttgataaaag

SEQ ID NO: 27 - DNA, 1563 bp, Homo sapiens
agttgcagtggaaagaaatgtgtcatctgtggtttggtttttaaaagtggaaaactagctgcacatatccttttttactgcagatttactttaaggctcatattctccaagtctattctgctttaaaaagaagacaagaaaagaagtggtttatcaaaatcacgttataatcagattttgaccaagcattttgtaagattgccaagtatgcccacggacatggaacacacaggacattacctacatcttgcctttctgatgacaacagttttttctttgtctcctggaacaaaagcaaactatacccgtctgtgggctaacagtacttcttcctgggattcagttattcaaaacaagacaggcagaaaccaaaatgaaaacattaacacaaaccctataactcctgaagtagattataaaggtaattctacaaacatgcctgaaacatctcacatcgtagctttaacttctaaatctgaacaggagctttatataccttctgtcgtcagcaacagtccttcaacagtacagagcattgaaaacacaagcaaaagtcatggtgaaattttcaaaaaggatgtctgtgcggaaaacaacaacaacatggctatgctaatttgcttaattataattgcagtgctttttcttatctgtacctttctatttctatcaactgtggttttggcaaacaaagtctcttctctcagacgatcaaaacaagtaggcaagcgtcagcctagaagcaatggcgattttctggcaagcggtctatggcccgctgaatcagacacttggaaaagaacaaaacagctcacaggacccaacctagtgatgcaatctactggagtgctcacagctacaagggaaagaaaagatgaagaaggaactgaaaaacttactaacaaacagataggttagtgaagaaaaatgcaaagtagcaatgagaaggcttatggagtaaaaatgaagtcagttggtatttaatcccaaagtgttgttctgattatctaaaatttgacatggtagaccttgcaatttagaatcaagcaggtgagacagggagaagtatgcctgcttaattatttaaactgtgtacttttgttttgacactgaatattttaaaaagcaaataataaaataactaagcatttgaggaaaattttaaggataaattgaggaaactgattaatagagatagcaagggataattaaataaatattccctatgtagcaacagtggttagatgatctttgtctgaatgtaataaaactttgaatagttttagtgtgtccttaaagccaagtatatgctttaacatcaaatggaagtcaaattcctaatgcatagatagagagagctaaactgtgtaatttaatggtatcttccttgctggatgtggcagaatccacaccagcttatcaaccaacacagctaattttagaataggtcctttatctttccatatggcacacgtaagaaagtgtttttctactattaatattaaattaaaacctttacttttgtataataaattaaaactcagaataaacctgtgaccacgt

SEQ ID NO: 28 - DNA, 1367 bp, Homo sapiens
ccggccggccgaagagttcacaagtgtgaagcctgaagccgccgggtgccgctgtgtagaaagaagctaaagcacttccagagcctgctgagctcagaggttcggaagacttatcgaccatggagcgcgcgtcctgcttgttgctgctgctgctgccgctggtgcacgtctctgcgaccacgccagaaccttgtgagctggacgatgaagatttccgctgcgtctgcaacttctccgaacctcagcccgactggtccgaagccttccagtgtgtgtctgcagtagaggtggagatccatgccggcggtctcaacctagagccgtttctaaagcgcgtcgatgcggacgccgacccgcggcagtatgctgacacggtcaaggctctccgcgtgcggcggctcacagtgggagccgcacaggttcctgctcagctactggtaggcgccctgcgtgtgctagcgtactcccgcctcaaggaactgacgctcgaggacctaaagataaccggcaccatgcctccgctgcctctggaagccacaggacttgcactttccagcttgcgcctacgcaacgtgtcgtgggcgacagggcgttcttggctcgccgagctgcagcagtggctcaagccaggcctcaaggtactgagcattgcccaagcacactcgcctgccttttcctgcgaacaggttcgcgccttcccggcccttaccagcctagacctgtctgacaatcctggactgggcgaacgcggactgatggcggctctctgtccccacaagttcccggccatccagaatctagcgctgcgcaacacaggaatggagacgcccacaggcgtgtgcgccgcactggcggcggcaggtgtgcagccccacagcctagacctcagccacaactcgctgcgcgccaccgtaaaccctagcgctccgagatgcatgtggtccagcgccctgaactccctcaatctgtcgttcgctgggctggaacaggtgcctaaaggactgccagccaagctcagagtgctcgatctcagctgcaacagactgaacagggcgccgcagcctgacgagctgcccgaggtggataacctgacactggacgggaatcccttcctggtccctggaactgccctcccccacgagggctcaatgaactccggcgtggtcccagcctgtgcacgttcgaccctgtcggtgggggtgtcgggaaccctggtgctgctccaaggggcccggggctttgcctaagatccaagacagaataatgaatggactcaaactgccttggcttcaggggagtcccgtcaggacgttgaggacttttcgaccaattcaaccctttgccccacctttattaaaatcttaaac

SEQ ID NO: 29 - DNA, 3597 bp, Homo sapiens; identical to SEQ ID NO: 24

SEQ ID NO: 30 - DNA, 2776 bp, Homo sapiens
cagggcagactggtagcaaagcccccacgcccagccaggagcaccgccgcggactccagcacaccgagggacatgctgggcctgcgccccccactgctcgccctggtggggctgctctccctcgggtgcgtcctctctcaggagtgcacgaagttcaaggtcagcagctgccgggaatgcatcgagtcggggcccggctgcacctggtgccagaagctgaacttcacagggccgggggatcctgactccattcgctgcgacacccggccacagctgctcatgaggggctgtgcggctgacgacatcatggaccccacaagcctcgctgaaacccaggaagaccacaatgggggccagaagcagctgtccccacaaaaagtgacgctttacctgcgaccaggccaggcagcagcgttcaacgtgaccttccggcgggccaagggctaccccatcgacctgtactatctgatggacctctcctactccatgcttgatgacctcaggaatgtcaagaagctaggtggcgacctgctccgggccctcaacgagatcaccgagtccggccgcattggcttcgggtccttcgtggacaagaccgtgctgccgttcgtgaacacgcaccctgataagctgcgaaacccatgccccaacaaggagaaagagtgccagcccccgtttgccttcaggcacgtgctgaagctgaccaacaactccaaccagtttcagaccgaggtcgggaagcagctgatttccggaaacctggatgcacccgagggtgggctggacgccatgatgcaggtcgccgcctgcccggaggaaatcggctggcgcaacgtcacgcggctgctggtgtttgccactgatgacggcttccatttcgcgggcgacggaaagctgggcgccatcctgacccccaacgacggccgctgtcacctggaggacaacttgtacaagaggagcaacgaattcgactacccatcggtgggccagctggcgcacaagctggctgaaaacaacatccagcccatcttcgcggtgaccagtaggatggtgaagacctacgagaaactcaccgagatcatccccaagtcagccgtgggggagctgtctgaggactccagcaatgtggtccatctcattaagaatgcttacaataaactctcctccagggtcttcctggatcacaacgccctccccgacaccctgaaagtcacctacgactccttctgcagcaatggagtgacgcacaggaaccagcccagaggtgactgtgatggcgtgcagatcaatgtcccgatcaccttccaggtgaaggtcacggccacagagtgcatccaggagcagtcgtttgtcatccgggcgctgggcttcacggacatagtgaccgtgcaggttcttccccagtgtgagtgccggtgccgggaccagagcagagaccgcagcctctgccatggcaagggcttcttggagtgcggcatctgcaggtgtgacactggctacattgggaaaaactgtgagtgccagacacagggccggagcagccaggagctggaaggaagctgccggaaggacaacaactccatcatctgctcagggctgggggactgtgtctgcgggcagtgcctgtgccacaccagcgacgtccccggcaagctgatatacgggcagtactgcgagtgtgacaccatcaactgtgagcgctacaacggccaggtctgcggcggcccggggagggggctctgcttctgcgggaagtgccgctgccacccgggctttgagggctcagcgtgccagtgcgagaggaccactgagggctgcctgaacccgcggcgtgttgagtgtagtggtcgtggccggtgccgctgcaacgtatgcgagtgccattcaggctaccagctgcctctgtgccaggagtgccccggctgcccctcaccctgtggcaagtacatctcctgcgccgagtgcctgaagttcgaaaagggcccctttgggaagaactgcagcgcggcgtgtccgggcctgcagctgtcgaacaaccccgtgaagggcaggacctgcaaggagagggactcagagggctgctgggtggcctacacgctggagcagcaggacgggatggaccgctacctcatctatgtggatgagagccgagagtgtgtggcaggccccaacatcgccgccatcgtcgggggcaccgtggcaggcatcgtgctgatcggcattctcctgctggtcatctggaaggctctgatccacctgagcgacctccgggagtacaggcgctttgagaaggagaagctcaagtcccagtggaacaatgataatccccttttcaagagcgccaccacgacggtcatgaaccccaagtttgctgagagttaggagcacttggtgaagacaaggccgtcaggacccaccatgtctgccccatcacgcggccgagacatggcttggccacagctcttgaggatgtcaccaattaaccagaaatccagttattttccgccctcaaaatgacagccatggccggccggtgcttctgggggctcgtcggggggacagctccactctgactggcacagtctttgcatggagacttgaggagggcttgaggttggtgaggttaggtgcgtgtttcctgtgcaagtcaggacatcagtctgattaaaggtggtgccaatttatttacatttaaacttgtcagggtataaaatgacatcccattaattatattgttaatcaatcacgtgtatagaaaaaaaaataaaacttcaat

SEQ ID NO: 31 - DNA, 1395 bp, Homo sapiens
atgacccccatcctcacggtcctgatctgtctcgggctgagtctgggccccaggacccacgtgcaggcagggcccttccccaaacccaccctctgggctgagccaggctctgtgatcagctgggggagccccgtgaccatctggtgtcaggggagcctggaggcccaggagtaccgactggataaagagggaagcccagagccctgggacagaaataacccactggaacccaagaacaaggccagattctccatcccatccataacagagcaccatgcggggagataccgctgccactattacagctctgcaggctggtcagagcccagcgacgccctggagctggtgatgacaggagcctatagcaaacccaccctctcagccctgcccagccctgtggtggcctcaggggggaatatgaccctccaatgtggctcacagaagggatatcaccaatttgttctgatgaaggaaggagaacaccagctcccccggaccctggactcacagcagctccacagtggggggttccaggccctgttccctgtgggccccgtgaaccccagccacaggtggaggttcacatgctattactattatatgaacaccccccgggtgtggtcccaccccagtgaccccctggagattctgccctcaggggtgtctaggaagccctccctcctgaccctgcagggccctgtcctggcccctgggcagagcctgaccctccagtgtggctctgatgtcggctacgacagatttgttctgtataaggagggggaacgtgacttcctccagcgccctggccagcagccccaggctgggctctcccaggccaacttcaccctgggccctgtgagcccctcccacgggggccagtacaggtgctatggtgcacacaacctctcctccgagtggtcggcccccagcgaccccctgaacatcctgatggcaggacagatctatgacaccgtctccctgtcagcacagccgggccccacagtggcctcaggagagaacgtgaccctgctgtgtcagtcatggtggcagtttgacactttccttctgaccaaagaaggggcagcccatcccccgctgcgtctgagatcaatgtacggagctcataagtaccaggctgaattccccatgagtcctgtgacctcagcccacgcggggacctacaggtgctacggctcatacagctccaacccccacctgctgtctttccccagtgagcccctggaactcatggtctcagcctcacacgccaaggattacacagtggagaatctcatccgcatgggcatggcaggcttggtcctggtgttcctcgggattctgttatttgaggctcagcacagccagagaaacccccaagatgcagcaaggaggtaa

SEQ ID NO: 32 - DNA, 1904 bp, Homo sapiens
agctatttcaaggcgcgcgcctcgtggtggactcaccgctagcccgcagcgctcggcttcctggtaattcttcacctcttttctcagctccctgcagcatgggtgctgggccctccttgctgctcgccgccctcctgctgcttctctccggcgacggcgccgtgcgctgcgacacacctgccaactgcacctatcttgacctgctgggcacctgggtcttccaggtgggctccagcggttcccagcgcgatgtcaactgctcggttatgggaccacaagaaaaaaaagtagtggtgtaccttcagaagctggatacagcatatgatgaccttggcaattctggccatttcaccatcatttacaaccaaggctttgagattgtgttgaatgactacaagtggtttgccttttttaagtataaagaagagggcagcaaggtgaccacttactgcaacgagacaatgactgggtgggtgcatgatgtgttgggccggaactgggcttgtttcaccggaaagaaggtgggaactgcctctgagaatgtgtatgtcaacacagcacaccttaagaattctcaggaaaagtattctaataggctctacaagtatgatcacaactttgtgaaagctatcaatgccattcagaagtcttggactgcaactacatacatggaatatgagactcttaccctgggagatatgattaggagaagtggtggccacagtcgaaaaatcccaaggcccaaacctgcaccactgactgctgaaatacagcaaaagattttgcatttgccaacatcttgggactggagaaatgttcatggtatcaattttgtcagtcctgttcgaaaccaagcatcctgtggcagctgctactcatttgcttctatgggtatgctagaagcgagaatccgtatactaaccaacaattctcagaccccaatcctaagccctcaggaggttgtgtcttgtagccagtatgctcaaggctgtgaaggcggcttcccataccttattgcaggaaagtacgcccaagattttgggctggtggaagaagcttgcttcccctacacaggcactgattctccatgcaaaatgaaggaagactgctttcgttattactcctctgagtaccactatgtaggaggtttctatggaggctgcaatgaagccctgatgaagcttgagttggtccatcatgggcccatggcagttgcttttgaagtatatgatgacttcctccactacaaaaaggggatctaccaccacactggtctaagagaccctttcaacccctttgagctgactaatcatgctgttctgcttgtgggctatggcactgactcagcctctgggatggattactggattgttaaaaacagctggggcaccggctggggtgagaatggctacttccggatccgcagaggaactgatgagtgtgcaattgagagcatagcagtggcagccacaccaattcctaaattgtagggtatgccttccagtatttcataatgatctgcatcagttgtaaaggggaattggtatattcacagactgtagactttcagcagcaatctcagaagcttacaaatagatttccatgaagatatttgtcttcagaattaaaactgcccttaattttaatatacctttcaatcggccactggccatttttttctaagtattcaattaagtgggaattttctggaagatggtcagctatgaagtaatagagtttgcttaatcatttgtaattcaaacatgctatattttttaaaatcaatgtgaaaacatagacttatttttaaattgtaccaatcacaagaaaataatggcaataattatcaaaacttttaaaatagatgctcatatttttaaaataaagttttaaaaataactgca

SEQ ID NO: 33 - DNA, 219 bp, Homo sapiens
atgtcttatcaacagcagcagtgcaagcagccctgccagccacctcctgtgtgccccacgccaaagtgcccagagccatgtccacccccgaagtgccctgagccctgcccaccaccaaagtgtccacagccctgcccacctcagcagtgccagcagaaatatcctcctgtgacaccttccccaccctgccagtcaaagtatccacccaagagcaagtaa

SEQ ID NO: 34 - DNA, 2727 bp, Homo sapiens
ggggacactggatcacctagtgtttcacaagcaggtaccttctgctgtaggagagagagaactaaagttctgaaagacctgttgcttttcaccaggaagttttactgggcatctcctgagcctaggcaatagctgtagggtgacttctggagccatccccgtttccccgccccccaaaagaagcggagatttaacggggacgtgcggccagagctggggaaatgggcccgcgagccaggccggcgcttctcctcctgatgcttttgcagaccgcggtcctgcaggggcgcttgctgcgttcacactctctgcactacctcttcatgggtgcctcagagcaggaccttggtctttccttgtttgaagctttgggctacgtggatgaccagctgttcgtgttctatgatcatgagagtcgccgtgtggagccccgaactccatgggtttccagtagaatttcaagccagatgtggctgcagctgagtcagagtctgaaagggtgggatcacatgttcactgttgacttctggactattatggaaaatcacaaccacagcaaggagtcccacaccctgcaggtcatcctgggctgtgaaatgcaagaagacaacagtaccgagggctactggaagtacgggtatgatgggcaggaccaccttgaattctgccctgacacactggattggagagcagcagaacccagggcctggcccaccaagctggagtgggaaaggcacaagattcgggccaggcagaacagggcctacctggagagggactgccctgcacagctgcagcagttgctggagctggggagaggtgttttggaccaacaagtgcctcctttggtgaaggtgacacatcatgtgacctcttcagtgaccactctacggtgtcgggccttgaactactacccccagaacatcaccatgaagtggctgaaggataagcagccaatggatgccaaggagttcgaacctaaagacgtattgcccaatggggatgggacctaccagggctggataaccttggctgtaccccctggggaagagcagagatatacgtgccaggtggagcacccaggcctggatcagcccctcattgtgatctgggagccctcaccgtctggcaccctagtcattggagtcatcagtggaattgctgtttttgtcgtcatcttgttcattggaattttgttcataatattaaggaagaggcagggttcaagaggagccatggggcactacgtcttagctgaacgtgagtgacacgcagcctgcagactcactgtgggaaggagacaaaactagagactcaaagagggagtgcatttatgagctcttcatgtttcaggagagagttgaacctaaacatagaaattgcctgacgaactccttgattttagccttctctgttcatttcctcaaaaagatttccccatttaggtttctgagttcctgcatgccggtgatccctagctgtgacctctcccctggaactgtctctcatgaacctcaagctgcatctagaggcttccttcatttcctccgtcacctcagagacatacacctatgtcatttcatttcctatttttggaagaggactccttaaatttgggggacttacatgattcattttaacatctgagaaaagctttgaaccctgggacgtggctagtcataaccttaccagatttttacacatgtatctatgcattttctggacccgttcaacttttcctttgaatcctctctctgtgttacccagtaactcatctgtcaccaagccttggggattcttccatctgattgtgatgtgagttgcacagctatgaaggctgtacactgcacgaatggaagaggcacctgtcccagaaaaagcatcatggctatctgtgggtagtatgatgggtgtttttagcaggtaggaggcaaatatcttgaaaggggttgtgaagaggtgttttttctaattggcatgaaggtgtcatacagatttgcaaagtttaatggtgccttcatttgggatgctactctagtattccagacctgaagaatcacaataattttctacctggtctctccttgttctgataatgaaaattatgataaggatgataaaagcacttacttcgtgtccgactcttctgagcacctacttacatgcattactgcatgcacttcttacaataattctatgagataggtactattatccccatttcttttttaaatgaagaaagtgaagtaggccgggcacggtggctcacgcctgtaatcccagggtgctgagattacaggtgtgagccaccctgcccagccgtcaaaagagtcttaatatatatatccagatggcatgtgtttactttatgttactacatgcacttggctgcataaatgtggtacaagcattctgtcttgaagggcaggtgcttcaggataccatatacagctcagaagtttcttctttaggcattaaattttagcaaagatatctcatctcttcttttaaaccattttctttttttgtggttagaaaagttatgtagaaaaaagtaaatgtgatttacgctcattgtagaaaagctataaaatgaatacaattaaagctgttatttaattagccagtgaaaaactattaacaacttgtctattacctgttagtattattgttgcattaaaaatgcatatactttaataaatgtatattgtattgtaaaaaaaaaaa

SEQ ID NO: 35 - DNA, 1843 bp, Homo sapiens
ataaaaaccgtcctcgggcgcggcggggagaagccgagctgagcggatcctcacacgactgtgatccgattctttccagcggcttctgcaaccaagcgggtcttacccccggtcctccgcgtctccagtcctcgcacctggaaccccaacgtccccgagagtccccgaatccccgctcccaggctacctaagaggatgagcggtgctccgacggccggggcagccctgatgctctgcgccgccaccgccgtgctactgagcgctcagggcggacccgtgcagtccaagtcgccgcgctttgcgtcctgggacgagatgaatgtcctggcgcacggactcctgcagctcggccaggggctgcgcgaacacgcggagcgcacccgcagtcagctgagcgcgctggagcggcgcctgagcgcgtgcgggtccgcctgtcagggaaccgaggggtccaccgacctcccgttagcccctgagagccgggtggaccctgaggtccttcacagcctgcagacacaactcaaggctcagaacagcaggatccagcaactcttccacaaggtggcccagcagcagcggcacctggagaagcagcacctgcgaattcagcatctgcaaagccagtttggcctcctggaccacaagcacctagaccatgaggtggccaagcctgcccgaagaaagaggctgcccgagatggcccagccagttgacccggctcacaatgtcagccgcctgcaccggctgcccagggattgccaggagctgttccaggttggggagaggcagagtggactatttgaaatccagcctcaggggtctccgccatttttggtgaactgcaagatgacctcagatggaggctggacagtaattcagaggcgccacgatggctcagtggacttcaaccggccctgggaagcctacaaggcggggtttggggatccccacggcgagttctggctgggtctggagaaggtgcatagcatcacgggggaccgcaacagccgcctggccgtgcagctgcgggactgggatggcaacgccgagttgctgcagttctccgtgcacctgggtggcgaggacacggcctatagcctgcagctcactgcacccgtggccggccagctgggcgccaccaccgtcccacccagcggcctctccgtacccttctccacttgggaccaggatcacgacctccgcagggacaagaactgcgccaagagcctctctggaggctggtggtttggcacctgcagccattccaacctcaacggccagtacttccgctccatcccacagcagcggcagaagcttaagaagggaatcttctggaagacctggcggggccgctactacccgctgcaggccaccaccatgttgatccagcccatggcagcagaggcagcctcctagcgtcctggctgggcctggtcccaggcccacgaaagacggtgactcttggctctgcccgaggatgtggccaagaccacgactggagaagccccctttctgagtgcaggggggctgcatgcgttgcctcctgagatcgaggctgcaggatatgctcagactctagaggcgtggaccaaggggcatggagcttcactccttgctggccagggagttggggactcagagggaccacttggggccagccagactggcctcaatggcggactcagtcacattgactgacggggaccagggcttgtgtgggtcgagagcgccctcatggtgctggtgctgttgtgtgtaggtcccctggggacacaagcaggcgccaatggtatctgggcggagctcacagagttcttggaataaaagcaacctcagaacactt

SEQ ID NO: 36 - DNA, 1946 bp, Homo sapiens
agacactgcccgctctccgggactccgcgccgctccccgttgccttccaggactgagaaaggggaaagggaagggtgccacgtccgagcagccgccttgactggggaagggtctgaatcccacccttggcattgcttggtggagactgagatacccgtgctccgctcgcctccttggttgaagatttctccttccctcacgtgatttgagccccgtttttattttctgtgagccacgtcctcctcgagcggggtcaatctggcaaaaggagtgatgcgcttcgcctggaccgtgctcctgctcgggcctttgcagctctgcgcgctagtgcactgcgcccctcccgccgccggccaacagcagcccccgcgcgagccgccggcggctccgggcgcctggcgccagcagatccaatgggagaacaacgggcaggtgttcagcttgctgagcctgggctcacagtaccagcctcagcgccgccgggacccgggcgccgccgtccctggtgcagccaacgcctccgcccagcagccccgcactccgatcctgctgatccgcgacaaccgcaccgccgcggcgcgaacgcggacggccggctcatctggagtcaccgctggccgccccaggcccaccgcccgtcactggttccaagctggctactcgacatctagagcccgcgaagctggcgcctcgcgcgcggagaaccagacagcgccgggagaagttcctgcgctcagtaacctgcggccgcccagccgcgtggacggcatggtgggcgacgacccttacaacccctacaagtactctgacgacaacccttattacaactactacgatacttatgaaaggcccagacctgggggcaggtaccggcccggatacggcactggctacttccagtacggtctcccagacctggtggccgacccctactacatccaggcgtccacgtacgtgcagaagatgtccatgtacaacctgagatgcgcggcggaggaaaactgtctggccagtacagcatacagggcagatgtcagagattatgatcacagggtgctgctcagatttccccaaagagtgaaaaaccaagggacatcagatttcttacccagccgaccaagatattcctgggaatggcacagttgtcatcaacattaccacagtatggatgagtttagccactatgacctgcttgatgccaacacccagaggagagtggctgaaggccacaaagcaagtttctgtcttgaagacacatcctgtgactatggctaccacaggcgatttgcatgtactgcacacacacagggattgagtcctggctgttatgatacctatggtgcagacatagactgccagtggattgatattacagatgtaaaacctggaaactatatcctaaaggtcagtgtaaaccccagctacctggttcctgaatctgactataccaacaatgttgtgcgctgtgacattcgctacacaggacatcatgcgtatgcctcaggctgcacaatttcaccgtattagaaggcaaagcaaaactcccaatggataaatcagtgcctggtgttctgaagtgggaaaaaatagactaacttcagtaggatttatgtattttgaaaaagagaacagaaaacaacaaaagaatttttgtttggactgttttcaataacaaagcacataactggattttgaacgcttaagtcatcattacttgggaaatttttaatgtttattatttacatcactttgtgaattaacacagtgtttcaattctgtaattacatatttgactctttcaaagaaatccaaatttctcatgttccttttgaaattgtagtgcaaaatggtcagtattatctaaatgaatgagccaaaatgactttgaactgaaacttttctaaagtgctggaactttagtgaaacataataataatgggtttata

SEQ ID NO: 37 - DNA, 3443 bp, Homo sapiens
ggaaaagcacttctgctctaccggcattaagaggcattccgtcttggaattccggcattaagaggcattccgtcttcatagcccgtgagacgccagtgtcacctttagcccaaccagtgccctgagggtggcattttcctaccttcctgtaacgacccccgggattgcccagggctacagcctctctcccgtgagcctccagaccgcccctggccccgccccccaccccgataggcccggccgggtctgggggcggggcgtttgcggcctttccagggccggggaaccccaggaggaagctgctgagccatgggctacgcgcgggcttcgggggtctgcgctcgcggctgcctggactcagcaggcccctggaccatgtcccgcgccctgcggccaccgctcccgcctctctgctttttccttttgttgctggcggctgccggtgctcgggccgggggatacgagacatgccccacagtgcagccgaacatgctgaacgtgcacctgctgcctcacacacatgatgacgtgggctggctcaaaaccgtggaccagtacttttatggaatcaagaatgacatccagcacgccggtgtgcagtacatcctggactcggtcatctctgccttgctggcagatcccacccgtcgcttcatttacgtggagattgccttcttctcccgttggtggcaccagcagacaaatgccacacaggaagtcgtgcgagaccttgtgcgccaggggcgcctggagttcgccaatggtggctgggtgatgaacgatgaggcagccacccactacggtgccatcgtggaccagatgacacttgggctgcgctttctggaggacacatttggcaatgatgggcgaccccgtgtggcctggcacattgaccccttcggccactctcgggagcaggcctcgctgtttgcgcagatgggcttcgacggcttcttctttgggcgccttgattatcaagataagtgggtacggatgcagaagctggagatggagcaggtgtggcgggccagcaccagcctgaagcccccgaccgcggacctcttcactggtgtgcttcccaatggttacaacccgccaaggaatctgtgctgggatgtgctgtgtgtcgatcagccgctggtggaggaccctcgcagccccgagtacaacgccaaggagctggtcgattacttcctaaatgtggccactgcccagggccggtattaccgcaccaaccacactgtgatgaccatgggctcggacttccaatatgagaatgccaacatgtggttcaagaaccttgacaagctcatccggctggtaaatgcgcagcaggcaaaaggaagcagtgtccatgttctctactccacccccgcttgttacctctgggagctgaacaaggccaacctcacctggtcagtgaaacatgacgacttcttcccttacgcggatggcccccaccagttctggaccggttacttttccagtcggccggccctcaaacgctacgagcgcctcagctacaacttcctgcaggtgtgcaaccagctggaggcgctggtgggcctggcggccaacgtgggaccctatggctccggagacagtgcacccctcaatgaggcgatggctgtgctccagcatcacgacgccgtcagcggcacctcccgccagcacgtggccaacgactacgcgcgccagcttgcggcaggctgggggccttgcgaggttcttctgagcaacgcgctggcgcggctcagaggcttcaaagatcacttcaccttttgccaacagctaaacatcagcatctgcccgctcagccagacggcggcgcgcttccaggtcatcgtttataatcccctggggcggaaggtgaattggatggtacggctgccggtcagcgaaggcgttttcgttgtgaaggaccccaatggcaggacagtgcccagcgatgtggtaatatttcccagctcagacagccaggcgcaccctccggagctgctgttctcagcctcactgcccgccctgggcttcagcacctattcagtagcccaggtgcctcgctggaagccccaggcccgcgcaccacagcccatccccagaagatcctggtcccctgctttaaccatcgaaaatgagcacatccgggcaacgtttgatcctgacacagggctgttgatggagattatgaacatgaatcagcaactcctgctgcctgttcgccagaccttcttctggtacaacgccagtataggtgacaacgaaagtgaccaggcctcaggtgcctacatcttcagacccaaccaacagaaaccgctgcctgtgagccgctgggctcagatccacctggtgaagacacccttggtgcaggaggtgcaccagaacttctcagcttggtgttcccaggtggttcgcctgtacccaggacagcggcacctggagctagagtggtcggtggggccgatacctgtgggcgacacctgggggaaggaggtcatcagccgttttgacacaccgctggagacaaagggacgcttctacacagacagcaatggccgggagatcctggagaggaggcgggattatcgacccacctggaaactgaaccagacggagcccgtggcaggaaactactatccagtcaacacccggatttacatcacggatggaaacatgcagctgactgtgctgactgaccgctcccaggggggcagcagcctgagagatggctcgctggagctcatggtgcaccgaaggctgctgaaggacgatggacgcggagtatcggagccactaatggagaacgggtcgggggcgtgggtgcgagggcgccacctggtgctgctggacacagcccaggctgcagccgccggacaccggctcctggcggagcaggaggtcctggcccctcaggtggtgctggccccgggtggcggcgccgcctacaatctcggggctcctccgcgcacgcagttctcagggctgcgcagggacctgccgccctcggtgcacctgctcacgctggccagctggggccccgaaatggtgctgctgcgcttggagcaccagtttgccgtaggagaggattccggacgtaacctgagcgcccccgttaccttgaacttgagggacctgttctccaccttcaccatcacccgcctgcaggagaccacgctggtggccaaccagctccgcgaggcagcctccaggctcaagtggacaacaaacacaggccccacaccccaccaaactccgtaccagctggacccggccaacatcacgctggaacccatggaaatccgcactttcctggcctcagttcaatggaaggaggtggatggttaggtctgctgggatgggccctccaagcccaagcctcctgctccgggggcagaccagactctgactctcctcttggggctgctgcattaaaacgtactactaag

SEQ ID NO: 38 - DNA, 1216 bp, Homo sapiens
ttcggcacttgggagaagatgtttgaaaaaactgactctgctaatgagcctggactcagagctcaagtctgaactctacctccagacagaatgaagttcatctcgacatctctgcttctcatgctgctggtcagcagcctctctccagtccaaggtgttctggaggtctattacacaagcttgaggtgtagatgtgtccaagagagctcagtctttatccctagacgcttcattgatcgaattcaaatcttgccccgtgggaatggttgtccaagaaaagaaatcatagtctggaagaagaacaagtcaattgtgtgtgtggaccctcaagctgaatggatacaaagaatgatggaagtattgagaaaaagaagttcttcaactctaccagttccagtgtttaagagaaagattccctgatgctgatatttccactaagaacacctgcattcttcccttatccctgctctggattttagttttgtgcttagttaaatcttttccagggagaaagaacttccccatacaaataaggcatgaggactatgtgaaaaataaccttgcaggagctgatggggcaaactcaagcttcttcactcacagcaccctatatacacttggagtttgcattcttattcatcagggaggaaagtttctttgaaaatagttattcagttataagtaatacaggattattttgattatatacttgttgtttaatgtttaaaatttcttagaaaacaatggaatgagaatttaagcctcaaatttgaacatgtggcttgaattaagaagaaaattatggcatatattaaaagcaggcttctatgaaagactcaaaaagctgcctgggaggcagatggaacttgagcctgtcaagaggcaaaggaatccatgtagtagatatcctctgcttaaaaactcactacggaggagaattaagtcctacttttaaagaatttctttataaaatttactgtctaagattaatagcattcgaagatccccagacttcatagaatactcagggaaagcatttaaagggtgatgtacacatgtatcctttcacacatttgccttgacaaacttctttcactcacatctttttcactgactttttttgtgggggcggggccggggggactctggtatctaattctttaatgattcctataaatctaatgacattcaataaagttgagcaaacattttactt

SEQ ID NO: 39 - DNA, 5026 bp, Homo sapiens
agaggaggaaattgttcctcgtctgataagacaacagtggagaaaggacgcatgctgtttcttagggacacggctgacttccagatatgaccatgtatttgtggcttaaactcttggcatttggctttgcctttctggacacagaagtatttgtgacagggcaaagcccaacaccttcccccactggattgactacagcaaagatgcccagtgttccactttcaagtgaccccttacctactcacaccactgcattctcacccgcaagcacctttgaaagagaaaatgacttctcagagaccacaacttctcttagtccagacaatacttccacccaagtatccccggactctttggataatgctagtgcttttaataccacaggtgtttcatcagtacagacgcctcaccttcccacgcacgcagactcgcagacgccctctgctggaactgacacgcagacattcagcggctccgccgccaatgcaaaactcaaccctaccccaggcagcaatgctatctcagatgtcccaggagagaggagtacagccagcacctttcctacagacccagtttccccattgacaaccaccctcagccttgcacaccacagctctgctgccttacctgcacgcacctccaacaccaccatcacagcgaacacctcagatgcctaccttaatgcctctgaaacaaccactctgagcccttctggaagcgctgtcatttcaaccacaacaatagctactactccatctaagccaacatgtgatgaaaaatatgcaaacatcactgtggattacttatataacaaggaaactaaattatttacagcaaagctaaatgttaatgagaatgtggaatgtggaaacaatacttgcacaaacaatgaggtgcataaccttacagaatgtaaaaatgcgtctgtttccatatctcataattcatgtactgctcctgataagacattaatattagatgtgccaccaggggttgaaaagtttcagttacatgattgtacacaagttgaaaaagcagatactactatttgtttaaaatggaaaaatattgaaacctttacttgtgatacacagaatattacctacagatttcagtgtggtaatatgatatttgataataaagaaattaaattagaaaaccttgaacccgaacatgagtataagtgtgactcagaaatactctataataaccacaagtttactaacgcaagtaaaattattaaaacagattttgggagtccaggagagcctcagattattttttgtagaagtgaagctgcacatcaaggagtaattacctggaatccccctcaaagatcatttcataattttaccctctgttatataaaagagacagaaaaagattgcctcaatctggataaaaacctgatcaaatatgatttgcaaaatttaaaaccttatacgaaatatgttttatcattacatgcctacatcattgcaaaagtgcaacgtaatggaagtgctgcaatgtgtcatttcacaactaaaagtgctcctccaagccaggtctggaacatgactgtctccatgacatcagataatagtatgcatgtcaagtgtaggcctcccagggaccgtaatggcccccatgaacgttaccatttggaagttgaagctggaaatactctggttagaaatgagtcgcataagaattgcgatttccgtgtaaaagatcttcaatattcaacagactacacttttaaggcctattttcacaatggagactatcctggagaaccctttattttacatcattcaacatcttataattctaaggcactgatagcatttctggcatttctgattattgtgacatcaatagccctgcttgttgttctctacaaaatctatgatctacataagaaaagatcctgcaatttagatgaacagcaggagcttgttgaaagggatgatgaaaaacaactgatgaatgtggagccaatccatgcagatattttgttggaaacttataagaggaagattgctgatgaaggaagactttttctggctgaatttcagagcatcccgcgggtgttcagcaagtttcctataaaggaagctcgaaagccctttaaccagaataaaaaccgttatgttgacattcttccttatgattataaccgtgttgaactctctgagataaacggagatgcagggtcaaactacataaatgccagctatattgatggtttcaaagaacccaggaaatacattgctgcacaaggtcccagggatgaaactgttgatgatttctggaggatgatttgggaacagaaagccacagttattgtcatggtcactcgatgtgaagaaggaaacaggaacaagtgtgcagaatactggccgtcaatggaagagggcactcgggcttttggagatgttgttgtaaagatcaaccagcacaaaagatgtccagattacatcattcagaaattgaacattgtaaataaaaaagaaaaagcaactggaagagaggtgactcacattcagttcaccagctggccagaccacggggtgcctgaggatcctcacttgctcctcaaactgagaaggagagtgaatgccttcagcaatttcttcagtggtcccattgtggtgcactgcagtgctggtgttgggcgcacaggaacctatatcggaattgatgccatgctagaaggcctggaagccgagaacaaagtggatgtttatggttatgttgtcaagctaaggcgacagagatgcctgatggttcaagtagaggcccagtacatcttgatccatcaggctttggtggaatacaatcagtttggagaaacagaagtgaatttgtctgaattacatccatatctacataacatgaagaaaagggatccacccagtgagccgtctccactagaggctgaattccagagacttccttcatataggagctggaggacacagcacattggaaatcaagaagaaaataaaagtaaaaacaggaattctaatgtcatcccatatgactataacagagtgccacttaaacatgagctggaaatgagtaaagagagtgagcatgattcagatgaatcctctgatgatgacagtgattcagaggaaccaagcaaatacatcaatgcatcttttataatgagctactggaaacctgaagtgatgattgctgctcagggaccactgaaggagaccattggtgacttttggcagatgatcttccaaagaaaagtcaaagttattgttatgctgacagaactgaaacatggagaccaggaaatctgtgctcagtactggggagaaggaaagcaaacatatggagatattgaagttgacctgaaagacacagacaaatcttcaacttatacccttcgtgtctttgaactgagacattccaagaggaaagactctcgaactgtgtaccagtaccaatatacaaactggagtgtggagcagcttcctgcagaacccaaggaattaatctctatgattcaggtcgtcaaacaaaaacttccccagaagaattcctctgaagggaacaagcatcacaagagtacacctctactcattcactgcagggatggatctcagcaaacgggaatattttgtgctttgttaaatctcttagaaagtgcggaaacagaagaggtagtggatatttttcaagtggtaaaagctctacgcaaagctaggccaggcatggtttccacattcgagcaatatcaattcctatatgacgtcattgccagcacctaccctgctcagaatggacaagtaaagaaaaacaaccatcaagaagataaaattgaatttgataatgaagtggacaaagtaaagcaggatgctaattgtgttaatccacttggtgccccagaaaagctccctgaagcaaaggaacaggctgaaggttctgaacccacgagtggcactgaggggccagaacattctgtcaatggtcctgcaagtccagctttaaatcaaggttcataggaaaagacataaatgaggaaactccaaacctcctgttagctgttatttctatttttgtagaagtaggaagtgaaaataggtatacagtggattaattaaatgcagcgaaccaatatttgtagaagggttatattttactactgtggaaaaatatttaagatagttttgccagaacagtttgtacagacgtatgcttattttaaaattttatctcttattcagtaaaaaacaacttctttgtaatcgttatgtgtgtatatgtatgtgtgtatgggtgtgtgtttgtgtgagagacagagaaagagagagaattctttcaagtgaatctaaaagcttttgcttttcctttgtttttatgaagaaaaaatacattttatattagaagtgttaacttagcttgaaggatctgtttttaaaaatcataaactgtgtgcagactcaataaaatcatgtacatttctgaaatgacctcaagatgtcctccttgttctactcatatatatctatcttatatacttactattttacttctagagatagtacataaaggtggtatgtgtgtgtatgctactacaaaaaagttgttaactaaattaacattgggaaatcttatattccatatattagcatttagtccaatgtctttttaagcttatttaattaaaaaatttccagtgagcttatcatgctgtctttacatggggttttcaattttgcatgctcgattattccctgtacaatatttaaaatttattgcttgatacttttgacaacaaattaggttttgtacaattgaacttaaataaatgtcattaaaataaataaatgcaatatgtattaatattcattgtataaaaatagaagaatacaaacatatttgttaaatatttacatatgaaatttaatatagctatttttatggaatttttcattgatatgaaaaatatgatattgcatatgcatagttcccatgttaaatcccattcataactttcattaaagcatttactttgaatttc

SEQ ID NO: 40 - DNA, 3496 bp, Homo sapiens
gaattctatggagtgtaattttgtgtatgaattatatttttaaaacattgaagagttttcagaaagaaggctagtagagttgattactgatactttatgctaagcagtacttttttggtagtacaatattttgttaggcgtttctgataacactagaaaggacaagttttatcttgtgataaattgattaatgtttacaacatgactgataattatagctgaatagtccttaaatgatgaacaggttatttagtttttaaatgcagtgtaaaaagtgtgctgtggaaattttatggctaactaagtttatggagaaaataccttcagttgatcaagaataatagtggtatacaaagttaggaagaaagtcaacatgatgctgcaggaaatggaaacaaatacaaatgatatttaacaaagatagagtttacagtttttgaactttaagccaaattcatttgacatcaagcactatagcaggcacaggttcaacaaagcttgtgggtattgacttcccccaaaagttgtcagctgaagtaatttagcccacttaagtaaatactatgatgataagctgtgtgaacttagcttttaaatagtgtgaccatatgaaggttttaattacttttgtttattggaataaaatgagattttttgggttgtcatgttaaagtgcttatagggaaagaagcctgcatataattttttaccttgtggcataatcagtaattggtctgttattcaggcttcatagcttgtaaccaaatataaataaaaggcataatttaggtattctatagttgcttagaattttgttaatataaatctctgtgaaaaatcaaggagttttaatattttcagaagtgcatccacctttcagggctttaagttagtattactcaagattatgaacaaatagcacttaggttacctgaaagagttactacaaccccaaagagttgtgttctaagtagtatcttggaaattcagagagatactcatcctacctgaatataaactgagataaatccagtaaagaaagtgtagtaaattctacataagagtctatcattgatttcttttggtggtaaaaatcttagttcatgtgaagaaatttcatgtgaatgttttagctatcaaacagcactgtcacctactcatgcacaaaactgcctcccaaagacttttcccaggtccctcgtatcaaaacattaagagtataatggaagatagcacgatcttgtcagattggacaaacagcaacaaacaaaaaatgaagtatgacttttcctgtgaactctacagaatgtctacatattcaactttccccgccggggtgcctgtctcagaaaggagtcttgctcgtgctggtttttattatactggtgtgaatgacaaggtcaaatgcttctgttgtggcctgatgctggataactggaaactaggagacagtcctattcaaaagcataaacagctatatcctagctgtagctttattcagaatctggtttcagctagtctgggatccacctctaagaatacgtctccaatgagaaacagttttgcacattcattatctcccaccttggaacatagtagcttgttcagtggttcttactccagcctttctccaaaccctcttaattctagagcagttgaagacatctcttcatcgaggactaacccctacagttatgcaatgagtactgaagaagccagatttcttacctaccatatgtggccattaacttttttgtcaccatcagaattggcaagagctggtttttattatataggacctggagatagggtagcctgctttgcctgtggtgggaagctcagtaactgggaaccaaaggatgatgctatgtcagaacaccggaggcattttcccaactgtccatttttggaaaattctctagaaactctgaggtttagcatttcaaatctgagcatgcagacacatgcagctcgaatgagaacatttatgtactggccatctagtgttccagttcagcctgagcagcttgcaagtgctggtttttattatgtgggtcgcaatgatgatgtcaaatgcttttgttgtgatggtggcttgaggtgttgggaatctggagatgatccatgggtagaacatgccaagtggtttccaaggtgtgagttcttgatacgaatgaaaggccaagagtttgttgatgagattcaaggtagatatcctcatcttcttgaacagctgttgtcaacttcagataccactggagaagaaaatgctgacccaccaattattcattttggacctggagaaagttcttcagaagatgctgtcatgatgaatacacctgtggttaaatctgccttggaaatgggctttaatagagacctggtgaaacaaacagttcaaagtaaaatcctgacaactggagagaactataaaacagttaatgatattgtgtcagcacttctaaatgctgaagatgaaaaaagagaggaggagaaggaaaaacaagctgaagaaatggcatcagatgatttgtcattaattcggaagaacagaatggctctctttcaacaattgacatgtgtgcttcctatcctggataatcttttaaaggccaatgtaattaataaacaggaacatgatattattaaacaaaaaacacagatacctttacaagcgagagaactgattgataccattttggttaaaggaaatgctgcggccaacatcttcaaaaactgtctaaaagaaattgactctacattgtataagaacttatttgtggataagaatatgaagtatattccaacagaagatgtttcaggtctgtcactggaagaacaattgaggaggttgcaagaagaacgaacttgtaaagtgtgtatggacaaagaagtttctgttgtatttattccttgtggtcatctggtagtatgccaggaatgtgccccttctctaagaaaatgccctatttgcaggggtataatcaagggtactgttcgtacatttctctcttaaagaaaaatagtctatattttaacctgcataaaaaggtctttaaaatattgttgaacacttgaagccatctaaagtaaaaagggaattatgagtttttcaattagtaacattcatgttctagtctgctttggtactaataatcttgtttctgaaaagatggtatcatatatttaatcttaatctgtttatttacaagggaagatttatgtttggtgaactatattagtatgtatgtgtacctaagggagtagtgtcactgcttgttatgcatcatttcaggagttactggatttgttgttctttcagaaagctttgaatactaaattatagtgtagaaaagaactggaaaccaggaactctggagttcatcagagttatggtgccgaattgtctttggtgcttttcacttgtgttttaaaataaggatttttctcttatttctccccctagtttgtgagaaacatctcaataaagtgcttt

SEQ ID NO: 41 - DNA, 2274 bp, Homo sapiens
atggcgggtctgacggcggcggccccgcggcccggagtcctcctgctcctgctgtccatcctccacccctctcggcctggaggggtccctggggccattcctggtggagttcctggaggagtcttttatccaggggctggtctcggagcccttggaggaggagcgctggggcctggaggcaaacctcttaagccagttcccggagggcttgcgggtgctggccttggggcagggctcggcgccttccccgcagttacctttccgggggctctggtgcctggtggagtggctgacgctgctgcagcctataaagctgctaaggctggcgctgggcttggtggtgtcccaggagttggtggcttaggagtgtctgcaggtgcggtggttcctcagcctggagccggagtgaagcctgggaaagtgccgggtgtggggctgccaggtgtatacccaggtggcgtgctcccaggagctcggttccccggtgtgggggtgctccctggagttcccactggagcaggagttaagcccaaggctccaggtgtaggtggagcttttgctggaatcccaggagttggaccctttgggggaccgcaacctggagtcccactggggtatcccatcaaggcccccaagctgcctggtggctatggactgccctacaccacagggaaactgccctatggctatgggcccggaggagtggctggtgcagcgggcaaggctggttacccaacagggacaggggttggcccccaggcagcagcagcagcggcagctaaagcagcagcaaagttcggtgctggagcagccggagtcctccctggtgttggaggggctggtgttcctggcgtgcctggggcaattcctggaattggaggcatcgcaggcgttgggactccagctgcagctgcagctgcagcagcagccgctaaggcagccaagtatggagctgctgcaggcttagtgcctggtgggccaggctttggcccgggagtagttggtgtcccaggagctggcgttccaggtgttggtgtcccaggagctgggattccagttgtcccaggtgctgggatcccaggtgctgcggttccaggggttgtgtcaccagaagcagctgctaaggcagctgcaaaggcagccaaatacggggccaggcccggagtcggagttggaggcattcctacttacggggttggagctgggggctttcccggctttggtgtcggagtcggaggtatccctggagtcgcaggtgtccctagtgtcggaggtgttcccggagtcggaggtgtcccgggagttggcatttcccccgaagctcaggcagcagctgccgccaaggctgccaagtacggagtggggaccccagcagctgcagctgctaaagcagccgccaaagccgcccagtttgggttagttcctggtgtcggcgtggctcctggagttggcgtggctcctggtgtcggtgtggctcctggagttggcttggctcctggagttggcgtggctcctggagttggtgtggctcctggcgttggcgtggctcccggcattggccctggtggagttgcagctgcagcaaaatccgctgccaaggtggctgccaaagcccagctccgagctgcagctgggcttggtgctggcatccctggacttggagttggtgtcggcgtccctggacttggagttggtgctggtgttcctggacttggagttggtgctggtgttcctggcttcggggcaggtgcagatgagggagttaggcggagcctgtcccctgagctcagggaaggagatccctcctcctctcagcacctccccagcaccccctcatcacccagggtacctggagccctggctgccgctaaagcagccaaatatggagcagcagtgcctggggtccttggagggctcggggctctcggtggagtaggcatcccaggcggtgtggtgggagccggacccgccgccgccgctgccgcagccaaagctgctgccaaagccgcccagtttggcctagtgggagccgctgggctcggaggactcggagtcggagggcttggagttccaggtgttgggggccttggaggtatacctccagctgcagccgctaaagcagctaaatacggtgctgctggccttggaggtgtcctagggggtgccgggcagttcccacttggaggagtggcagcaagacctggcttcggattgtctcccattttcccaggtggggcctgcctggggaaagcttgtggccggaagagaaaatga

SEQ ID NO: 42 - DNA, 1125 bp, Homo sapiens
gtctcccccactgtcagcacctcttctgtgtggtgagtggaccgcttaccccactaggtgaagatgtcagcccaggagagctgcctcagcctcatcaagtacttcctcttcgttttcaacctcttcttcttcgtcctcggcagcctgatcttctgcttcggcatctggatcctcatcgacaagaccagcttcgtgtcctttgtgggcttggccttcgtgcctctgcagatctggtccaaagtcctggccatctcaggaatcttcaccatgggcatcgccctcctgggttgtgtgggggccctcaaggagctccgctgcctcctgggcctgtattttgggatgctgctgctcctgtttgccacacagatcaccctgggaatcctcatctccactcagcgggcccagctggagcgaagcttgcgggacgtcgtagagaaaaccatccaaaagtacggcaccaaccccgaggagaccgcggccgaggagagctgggactatgtgcagttccagctgcgctgctgcggctggcactacccgcaggactggttccaagtcctcatcctgagaggtaacgggtcggaggcgcaccgcgtgccctgctcctgctacaacttgtcggcgaccaacgactccacaatcctagataaggtgatcttgccccagctcagcaggcttggacacctggcgcggtccagacacagtgcagacatctgcgctgtccctgcagagagccacatctaccgcgagggctgcgcgcagggcctccagaagtggctgcacaacaaccttatttccatagtgggcatttgcctgggcgtcggcctactcgagctcgggttcatgacgctctcgatattcctgtgcagaaacctggaccacgtctacaaccggctcgctcgataccgttaggccccgccctccccaaagtcccgccccgcccccgtcacgtgcgctgggcacttccctgctgcctgtaaatatttgtttaatccccagttcgcctggagccctccgccttcacattcccctggggacccacgtggctgcgtgcccctgctgctgtcacctctcccacgggacctggggctttcgtccacagcttcctgtccccatctgtcggcctac

SEQ ID NO: 43 - DNA, 1646 bp, Homo sapiens
cactgcgaagcccagctgcgcgcgccttgggattgactgtccacgctcgcccggctcgtccgacgcgccctccgccagccgacagacacagccgcacgcactgccgtgttctccctgcggctcggacacatagtatgaccattaggtgtttcgtctcccacccattttctatggaaaaccaaggggatcgggccatgatagccactggcagctttgaagaacgggacacctttagagaagcttgatcttggaggcctcaccgtgagaccttacaaagccggattccggcagagttcctctatctcgtcttgttgctgattaaaggtgcccctgtctccagtttttctccatctcctgggacgtagcaggaaatcagcatcatggttgggttcaaggccacagatgtgccccctactgccactgtgaagtttcttggggctggcacagctgcctgcatcgcagatctcatcacctttcctctggatactgctaaagtccggttacagatccaaggagaaagtcaggggccagtgcgcgctacagccagcgcccagtaccgcggtgtgatgggcaccattctgaccatggtgcgtactgagggcccccgaagcctctacaatgggctggttgccggcctgcagcgccaaatgagctttgcctctgtccgcatcggcctgtatgattctgtcaaacagttctacaccaagggctctgagcatgccagcattgggagccgcctcctagcaggcagcaccacaggtgccctggctgtggctgtggcccagcccacggatgtggtaaaggtccgattccaagctcaggcccgggctggaggtggtcggagataccaaagcaccgtcaatgcctacaagaccattgcccgagaggaagggttccggggcctctggaaagggacctctcccaatgttgctcgtaatgccattgtcaactgtgctgagctggtgacctatgacctcatcaaggatgccctcctgaaagccaacctcatgacagatgacctcccttgccacttcacttctgcctttggggcaggcttctgcaccactgtcatcgcctcccctgtagacgtggtcaagacgagatacatgaactctgccctgggccagtacagtagcgctggccactgtgcccttaccatgctccagaaggaggggccccgagccttctacaaagggttcatgccctcctttctccgcttgggttcctggaacgtggtgatgttcgtcacctatgagcagctgaaacgagccctcatggctgcctgcacttcccgagaggctcccttctgagcctctcctgctgctgacctgatcacctctggctttgtctctagccgggccatgctttccttttcttccttctttctcttccctccttcccttctctccttccctctttccccacctcttccttccgctcctttacctaccaccttccctctttctacattctcatctactcattgtctcagtgctggtggagttgacatttgacagtgtgggaggcctcgtaccagccaggatcccaagcgtcccgtcccttggaaagttcagccagaatcttcgtcctgcccccgacagcccagcctagcccacttgtcatccataaagcaagctcaaccttgg

SEQ ID NO: 44 - DNA, 1451 bp, Homo sapiens
gaagagcaagcgccatgttgaagccatcattaccattcacatccctcttattcctgcagctgcccctgctgggagtggggctgaacacgacaattctgacgcccaatgggaatgaagacaccacagctgatttcttcctgaccactatgcccactgactccctcagtgtttccactctgcccctcccagaggttcagtgttttgtgttcaatgtcgagtacatgaattgcacttggaacagcagctctgagccccagcctaccaacctcactctgcattattggtacaagaactcggataatgataaagtccagaagtgcagccactatctattctctgaagaaatcacttctggctgtcagttgcaaaaaaaggagatccacctctaccaaacatttgttgttcagctccaggacccacgggaacccaggagacaggccacacagatgctaaaactgcagaatctggtgatcccctgggctccagagaacctaacacttcacaaactgagtgaatcccagctagaactgaactggaacaacagattcttgaaccactgtttggagcacttggtgcagtaccggactgactgggaccacagctggactgaacaatcagtggattatagacataagttctccttgcctagtgtggatgggcagaaacgctacacgtttcgtgttcggagccgctttaacccactctgtggaagtgctcagcattggagtgaatggagccacccaatccactgggggagcaatacttcaaaagagaatcctttcctgtttgcattggaagccgtggttatctctgttggctccatgggattgattatcagccttctctgtgtgtatttctggctggaacggacgatgccccgaattcccaccctgaagaacctagaggatcttgttactgaataccacgggaacttttcggcctggagtggtgtgtctaagggactggctgagagtctgcagccagactacagtgaacgactctgcctcgtcagtgagattcccccaaaaggaggggcccttggggaggggcctggggcctccccatgcaaccagcatagcccctactgggcccccccatgttacaccctaaagcctgaaacctgaaccccaatcctctgacagaagaaccccagggtcctgtagccctaagtggtactaactttccttcattcaacccacctgcgtctcatactcacctcaccccactgtggctgatttggaattttgtgcccccatgtaagcaccccttcatttggcattccccacttgagaattacccttttgccccgaacatgtttttcttctccctcagtctggcccttccttttcgcaggattcttcctccctccctctttccctcccttcctctttccatctaccctccgattgttcctgaaccgatgagaaataaagtttctgttgataatcatc

SEQ ID NO: 45 - DNA, 7171 bp, Homo sapiens
aagaagaggtagcgagtggacgtgactgctctatcccgggcaaaagggatagaaccagaggtggggagtctgggcagtcggcgacccgcgaagacttgaggtgccgcagcggcatccggagtagcgccgggctccctccggggtgcagccgccgtcgggggaagggcgccacaggccgggaagacctcctccctttgtgtccagtagtggggtccaccggagggcggcccgtgggccgggcctcaccgcggcgctccgggactgtggggtcaggctgcgttgggtggacgcccacctcgccaaccttcggaggtccctgggggtcttcgtgcgccccggggctgcagagatccaggggaggcgcctgtgaggcccggacctgccccggggcgaagggtatgtggcgagacagagccctgcacccctaattcccggtggaaaactcctgttgccgtttccctccaccggcctggagtctcccagtcttgtcccggcagtgccgccctccccactaagacctaggcgcaaaggcttggctcatggttgacagctcagagagagaaagatctgagggaagatggatgcaaaagctcgaaattgtttgcttcaacatagagaagctctggaaaaggacatcaagacatcctacatcatggatcacatgattagtgatggatttttaacaatatcagaagaggaaaaagtaagaaatgagcccactcaacagcaaagagcagctatgctgattaaaatgatacttaaaaaagataatgattcctacgtatcattctacaatgctctactacatgaaggatataaagatcttgctgcccttctccatgatggcattcctgttgtctcttcttccagtgtaaggacagtcctgtgtgaaggtggagtaccacagaggccagttgtttttgtcacaaggaagaagctggtgaatgcaattcagcagaagctctccaaattgaaaggtgaaccaggatgggtcaccatacatggaatggcaggctgtgggaagtctgtattagctgcagaagctgttagagatcattcccttttagaaggttgtttcccagggggagtgcattgggtttcagttgggaaacaagacaaatctgggcttctgatgaaactgcagaatctttgcacacggttggatcaggatgagagtttttcccagaggcttccacttaatattgaagaggctaaagaccgtctccgcattctgatgcttcgcaaacacccaaggtctctcttgatcttggatgatgtttgggactcttgggtgttgaaagcttttgacagtcagtgtcagattcttcttacaaccagagacaagagtgttacagattcagtaatgggtcctaaatatgtagtccctgtggagagttccttaggaaaggaaaaaggacttgaaattttatccctttttgttaatatgaagaaggcagatttgccagaacaagctcatagtattataaaagaatgtaaaggctctccccttgtagtatctttaattggtgcacttttacgtgattttcccaatcgctgggagtactacctcaaacagcttcagaataagcagtttaagagaataaggaaatcttcgtcttatgattatgaggctctagatgaagccatgtctataagtgttgaaatgctcagagaagacatcaaagattattacacagatctttccatccttcagaaggacgttaaggtgcctacaaaggtgttatgtattctctgggacatggaaactgaagaagttgaagacatactgcaggagtttgtaaataagtctcttttattctgtgatcggaatggaaagtcgtttcgttattatttacatgatcttcaagtagattttcttacagagaagaattgcagccagcttcaggatctacataagaagataatcactcagtttcagagatatcaccagccgcatactctttcaccagatcaggaagactgtatgtattggtacaactttctggcctatcacatggccagtgccaagatgcacaaggaactttgtgctttaatgttttccctggattggattaaagcaaaaacagaacttgtaggccctgctcatctgattcatgaatttgtggaatacagacatatactagatgaaaaggattgtgcagtcagtgagaattttcaggagtttttatctttaaatggacaccttcttggacgacagccatttcctaatattgtacaactgggtctctgtgagccggaaacttcagaagtttatcagcaagctaagctgcaggccaagcaggaggtcgataatggaatgctttacctggaatggataaacaaaaaaaacatcacgaatctttcccgcttagttgtccgcccccacacagatgctgtttaccatgcctgcttttctgaggatggtcagagaatagcttcttgtggagctgataaaaccttacaggtgttcaaagctgaaacaggagagaaacttctagaaatcaaggctcatgaggatgaagtgctttgttgtgcattctctacagatgacagatttatagcaacctgctcagtggataaaaaagtgaagatttggaattctatgactggggaactagtacacacctatgatgagcactcagagcaagtcaattgctgccatttcaccaacagtagtcatcatcttctcttagccactgggtcaagtgactgcttcctcaaactttgggatttgaatcaaaaagaatgtcgaaataccatgtttggtcatacaaattcagtcaatcactgcagattttcaccagatgataagcttttggctagttgttcagctgatggaaccttaaagctttgggatgcgacatcagcaaatgagaggaaaagcattaatgtgaaacagttcttcctaaatttggaggaccctcaagaggatatggaagtgatagtgaagtgttgttcgtggtctgctgatggtgcaaggataatggtggcagcaaaaaataaaatctttctttttgacattcatactagtggcctattgggagaaatccacacgggccatcacagcaccatccagtactgtgacttctccccacaaaaccatttggcagtggttgctttgtcccagtactgtgtagagttgtggaatacagactcacgttcaaaggtggctgattgcagaggacatttaagttgggttcatggtgtgatgttttctcctgatggatcatcatttttgacatcttctgatgaccagacaatcaggctctgggagacaaagaaagtatgtaagaactctgctgtaatgttaaagcaagaagtagatgttgtgtttcaagaaaatgaagtgatggtccttgcagttgaccatataagacgtctgcaactcattaatggaagaacaggtcagattgattatctgactgaagctcaagttagctgctgttgcttaagtccacatcttcagtacattgcatttggagatgaaaatggagccattgagattttagaacttgtaaacaatagaatcttccagtccaggtttcagcacaagaaaactgtatggcacatccagttcacagccgatgagaagactcttatttcaagttctgatgatgctgaaattcaggtatggaattggcaattggacaaatgtatctttctacgaggccatcaggaaacagtgaaagactttagactcttgaaaaattcaagactgctttcttggtcatttgatggaacagtgaaggtatggaatattattactggaaataaagaaaaagactttgtctgtcaccagggtacagtactttcttgtgacatttctcacgatgctaccaagttttcatctacctctgctgacaagactgcaaagatctggagttttgatctccttttgccacttcatgaattgaggggccacaacggctgtgtgcgctgctctgccttctctgtggacagtaccctgctggcaacgggagatgacaatggagaaatcaggatatggaatgtctcaaacggtgagcttcttcatttgtgtgctccgctttcagaagaaggagctgctacccatggaggctgggtgactgacctttgcttttctccagatggcaaaatgcttatctctgctggaggatatattaagtggtggaacgttgtcactggggaatcctcacagaccttctacacaaatggaaccaatcttaagaaaatacacgtgtcccctgacttcaaaacatatgtgactgtggataatcttggtattttatatattttacagactttagaataaaatagttaagcattaatgtagttgaactttttaaatttttgaattggaaaaaaattctaatgaaaccctgatatcaactttttataaagctcttaattgttgtgcagtattgcattcattacaaaagtgtttgtggttggatgaataatattaatgtagctttttcccaaatgaacatacctttaatcttgtttttcatgatcatcattaacagtttgtccttaggatgcaaatgaaaatgtgaatacataccttgttgtactgttggtaaaattctgtcttgatgcattcaaaatggttgacataattaatgagaagaatttggaagaaattggtattttaatactgtctgtatttattactgttatgcaggctgtgcctcagggtagcagtggcctgctttttgaaccacacttaccccaagggggttttgttctcctaaatacaatcttagaggttttttgcactctttaaatttgctttaaaaatattgtgtctgtgtgcatagtctgcagcatttcctttaattgactcaataagtgagtcttggatttagcaggcccccccaccttttttttttgtttttggagacagagtcttgctttgttgccaggctggagtgcagtggcgcgatctcggctcaccacaatcgctgcctcctgggttcaagcaattctcctgcctcagcctcccgagtagctgggactacaggtgtgcgcacatgccaggctaatttttgtatttttagtagagacggggtttcaccatgttggccgggatggtctcgatctcttgacctcatgatctacccgccttggcctcccaaagtgctgagattacaggcgtgagccaccgtgcctggccaggccccttctcttttaatggagacagggtcttgcactatcacccaggctggagtgcagtggcataatcatacctcattgcagcctcagactcctgggttcaagcaatcctcctgcctcagcctcccaagtagctgagactgcaggcacgagccaccacacccagctaatttttaagttttcttgtagagacagggtctcactatgttgtctaggctggtcttgaactcttggcctcaagtaatcctcctgcctcagcctcccaaagtgttgggattgcagatatgagccactggcctggccttcagcagttctttttgtgaagtaaaacttgtatgttggaaagagtagattttattggtctacccttttctcactgtagctgctggcagccctgtgccatatctggactctagttgtcagtatctgagttggacactattcctgctccctcttgtttcttacatatcagacttcttacttgaatgaaacctgatctttcctaatcctcacttttttcttttttaaaaagcagtttctccactgctaaatgttagtcattgaggtggggccaattttaatcataagccttaataagatttttctaagaaatgtgaaatagaacaattttcatctaattccatttacttttagatgaatggcattgtgaatgccattcttttaatgaatttcaagagaattctctggttttctgtgtaattccagatgagtcactgtaactctagaagattaaccttccagccaacctattttcctttcccttgtctctctcatcctcttttccttccttctttcctttctcttcttttatctccaaggttaatcaggaaaaatagcttttgacaggggaaaaaactcaataactagctatttttgacctcctgatcaggaactttagttgaagcgtaaatctaaagaaacattttctctgaaatatattattaagggcaatggagataaattaatagtagatgtggttcccagaaaatataatcaaaattcaaagattttttttgtttctgtaactggaactaaatcaaatgattactagtgttaatagtagataacttgtttttattgttggtgcatattagtataactgtggggtaggtcggggagagggtaagggaatagatcactcagatgtattttagataagctatttagcctttgatggaatcataaatacagtgaatacaatcctttgcattgttaaggaggttttttgtttttaaatggtgggtcaaggagctagtttacaggcttactgtgatttaagcaaatgtgaaaagtgaaaccttaattttatcaaaagaaatttctgtaaatggtatgtctccttagaatacccaaatcataattttatttgtacacactgttaggggctcatctcatgtaggcagagtataaagtattaccttttggaattaaaagccactgactgttataaagtataacaacacacatcaggttttaaaaagccttgaatggcccttgtcttaaaaagaaattaggagccaggtgcggtggcacgtgcctgtagtcccagctccttgggaggctgagacaggaggattccttgagccctggagtttgagtccagcctgggtgacatagcaagaccctgtcttaaaagaaaaatgggaagaaagacaaggtaacatgaagaaagaagagatacctagtatgatggagctgcaaatttcatggcagttcatgcagtcggtcaagaggaggattttgttttgtagtttgcagatgagcatttctaaagcattttcccttgctgtatttttttgtattataaattacattggacttcatatatataatttttttttacattatatgtctcttgtatgttttgaaactcttgtatttatgatatagcttatatgatttttttgccttggtatacattttaaaatatgaatttaaaaaatttttgtaaaaataaaattcacaaaattgttttgaaaaacaaaaaaaaaaaaaa

SEQ ID NO: 46 - DNA, 717 bp, Homo sapiens
agagcgatcatgtcgcacaaacaaatttactattcggacaaatacgacgacgaggagtttgagtatcgacatgtcatgctgcccaaggacatagccaagctggtccctaaaacccatctgatgtctgaatctgaatggaggaatcttggcgttcagcagagtcagggatgggtccattatatgatccatgaaccagaacctcacatcttgctgttccggcgcccactacccaagaaaccaaagaaatgaagctggcaagctacttttcagcctcaagctttacacagctgtccttacttcctaacatctttctgataacattattatgttgccttcttgtttctcactttgatatttaaaagatgttcaatacactgtttgaatgtgctggtaactgctttgcttcttgagtagagccaccaccaccatagcccagccagatgagtgctctgtggacccacagcctaagctgagtgtgaccccagaagccacgatgtgctctgtatccagaacacacttggcagatggaggaagcatctgagtttgagaccatggctgttacagggatcatgtaaacttgctgtttttgttttttctgccgggtgttgtatgtgtggtgacttgcggatttatgtttcagtgtactggaaactttccattttattcaagaaatctgttcatgttaaaagccttgattaaagaggaagtttttataat

SEQ ID NO: 47 - DNA, 3237 bp, Homo sapiens
gcgaagtgaagggtggcccaggtggggccaggctgactgaatgtatctcctagctatggactaaataatacatggggggaaataaacaagtattcatgagggtgaaaatgtgacccagcaggaaaattacaactattttcaattgacgttgaataggatgagtcatggaatttaagtgatttactgaagattatactactggtagatagaagagctaaagaaagatggatactatgatgctgaatgtgcggaatctgtttgagcagcttgtgcgccgggtggagattctcagtgaaggaaatgaagtccaatttatccagttggcgaaggactttgaggatttccgtaaaaagtggcagaggactgaccatgagctggggaaatacaaggatcttttgatgaaagcagagactgagcgaagtgctctggatgttaagctgaagcatgcacgtaatcaggtggatgtagagatcaaacggagacagagagctgaggctgactgcgaaaagctggaacgacagattcagctgattcgagagatgctcatgtgtgacacatctggcagcattcaactaagcgaggagcaaaaatcagctctggcttttctcaacagaggccaaccatccagcagcaatgctgggaacaaaagactatcaaccattgatgaatctggttccattttatcagatatcagctttgacaagactgatgaatcactggattgggactcttctttggtgaagactttcaaactgaagaagagagaaaagaggcgctctactagccgacagtttgttgatggtccccctggacctgtaaagaaaactcgttccattggctctgcagtagaccaggggaatgaatccatagttgcaaaaactacagtgactgttcccaatgatggcgggcccatcgaagctgtgtccactattgagactgtgccatattggaccaggagccgaaggaaaacaggtactttacaaccttggaacagtgactccaccctgaacagcaggcagctggagccaagaactgagacagacagtgtgggcacgccacagagtaatggagggatgcgcctgcatgactttgtttctaagacggttattaaacctgaatcctgtgttccatgtggaaagcggataaaatttggcaaattatctctgaagtgtcgagactgtcgtgtggtctctcatccagaatgtcgggaccgctgtccccttccctgcattcctaccctgataggaacacctgtcaagattggagagggaatgctggcagactttgtgtcccagacttctccaatgatcccctccattgttgtgcattgtgtaaatgagattgagcaaagaggtctgactgagacaggcctgtataggatctctggctgtgaccgcacagtaaaagagctgaaagagaaattcctcagagtgaaaactgtacccctcctcagcaaagtggatgatatccatgctatctgtagccttctaaaagactttcttcgaaacctcaaagaacctcttctgacctttcgccttaacagagcctttatggaagcagcagaaatcacagatgaagacaacagcatagctgccatgtaccaagctgttggtgaactgccccaggccaacagggacacattagctttcctcatgattcacttgcagagagtggctcagagtccacatactaaaatggatgttgccaatctggctaaagtctttggccctacaatagtggcccatgctgtgcccaatccagacccagtgacaatgttacaggacatcaagcgtcaacccaaggtggttgagcgcctgctttccttgcctctggagtattggagtcagttcatgatggtggagcaagagaacattgaccccctacatgtcattgaaaactcaaatgccttttcaacaccacagacaccagatattaaagtgagtttactgggacctgtgaccactcctgaacatcagcttctcaagactccttcatctagttccctgtcacagagagtccgttccaccctcaccaagaacactcctagatttgggagcaaaagcaagtctgccactaacctaggacgacaaggcaacttttttgcttctccaatgctcaagtgaagtcacatctgcctgttacttcccagcattgactgactataagaaaggacacatctgtactctgctctgcagcctcctgtactcattactacttttagcattctccaggcttttactcaagtttaattgtgcatgagggttttattaaaactatatatatctccccttccttctcctcaagtcacataatatcagcactttgtgctggtcattgttgggagcttttagatgagacatctttccaggggtagaagggttagtatggaattggttgtgattctttttggggaagggggttattgttcctttggcttaaagccaaatgctgctcatagaatgatctttctctagtttcatttagaactgatttccgtgagacaatgacagaaaccctacctatctgataagattagcttgtctcagggtgggaagtgggagggcagggcaaagaaaggattagaccagaggatttaggatgcctccttctaagaaccagaagttctcattccccattatgaactgagctataatatggagctttcataaaaatgggatgcattgaggacagaactagtgatgggagtatgcgtagctttgatttggatgattaggtctttaatagtgttgagtggcacaaccttgtaaatgtgaaagtacaactcgtatttatctctgatgtgccgctggctgaactttgggttcatttggggtcaaagccagtttttcttttaaaattgaattcattctgatgcttggcccccatacccccaaccttgtccagtggagcccaacttctaaaggtcaatatatcatcctttggcatcccaactaacaataaagagtaggctataagggaagattgtcaatattttgtggtaagaaaagctacagtcattttttctttgcactttggatgctgaaatttttcccatggaacatagccacatctagatagatgtgagctttttcttctgttaaaattattcttaatgtctgtaaaaacgattttcttctgtagaatgtttgacttcgtattgacccttatctgtaaaacacctatttgggataatatttggaaaaaaagtaaatagctttttcaaaatgaaaaaaaaaa

SEQ ID NO: 48 - DNA, 780 bp, Homo sapiens
ggatataggcgcccccacacccgggcccggctaagcgccgccgccgctcctcgcctccttgctgcacgatggcctcgctccgggtggagcgcgccggcggcccgcgtctccctaggacccgagtcgggcggccggcagccgtccgcctcctccttctgctgggcgctgtcctgaatccccacgaggccctggctcagcctcttcccaccacaggcacaccagggtcagaaggggggacggtgaagaactatgagacagctgtccaattttgctggaatcattataaggatcaaatggatcctatcgaaaaggattggtgcgactgggccatgattagcaggccttatagcaccctgcgagattgcctggagcactttgcagagttgtttgacctgggcttccccaatcccttggcagagaggatcatctttgagactcaccagatccactttgccaactgctccctggtgcagcccaccttctctgaccccccagaggatgtactcctggccatgatcatagcccccatctgcctcatccccttcctcatcactcttgtagtatggaggagtaaagacagtgaggcccaggcctagggggcacgagcttctcaacaaccatgttactccacttccccacccccaccaggcctccctcctcccctcctactcccttttctcactctcatccccaccacagatccctggattgctgggaatggaagccagggttgggcatggcacaagttctgtaatcttcaaaataaaactttttttttga

SEQ ID NO: 49 - DNA, 1763 bp, Homo sapiens
cccgggacggcagcaggtgggctgcacacggactctgggacaagtcgagctgaaaaccgcggagcaggggtggggtggagacgcccgcgacgccaaggctggggtcccggaacacgctgggaggagggtggaaggcaacctcggggaaactgggaaaggcggcctggacttcgggaacaccgcgtacctgcgggggcacagcccacccgagcgaacgggctccaaagggaaggtcccgcggtgcccaccggcagagctcagggggtggtgcgcccggcccttctgcggcgcacagcccagcccaggaacgcgggcggtgcggactcagcgggccgggtgcaggcgcggagctgggcctctgcgcccggcccgacctccgtctataaatagagcagccagttgcagggctccattctgctttccaactgcctgactgcttgttcgtctcactggtgtgagctccagcatcccctttgctcgaaatggaccccaactgctcttgcgccactggtaagggaagctctgcgccctggaatccccatttcccagccctattacagagggtctctgggtttcaggaagtcgcattttaagttctgagcgacggggactccagtacttcgttagatgctttcttcctgatcacgcccctgagagcattgccctcatccctgggcctctacgtcagagttaagaatactgaggctcaaggctgaactgctccacatcacccagttggtcatgggcctgctggctgggccccagtgctctgtccaggctctgagcaatcagtgtggttgggggtgctggaaacattgactcttcagagttcaggacagaaggttctggctcgcagtctcaatattcctgggttgtatgtgcacgtgggaccttcctggtgcggtaaaacaggagggtccttgccccttccccagcgttagtgagaggacatggggcttctgttcctctgtcctgagtgggaaaggagctctgagggctggccctgcacagaggagggggcactggagactcactgacccactgctgtaccttctgcatctcactcactgcccactgcgttttcctcttccttgtaggtggctcctgcacgtgcgccggctcctgcaagtgcaaagagtgcaaatgcacctcctgcaagaagagtgagtgcggggccatctccaggaatctggggctgtggctcaggttgggagggaactcaaggctggccctgagtgcatccttctggggaactgggctttctttgccctcattgcccgtgtcattccctctccaggctttctgccctaaattcagatggggcaggacagcatttttctcgtgggacacaaaccccaactgtaccccctatggtttcagaacagagctgtgccagacgaaaaaaagcatcctctgggtctgggttctgagctcgagccaggcttgctattagggcagggaggtgcccggtcaagtctactgccacctctcactctccccttcttccccaggctgctgttcctgctgccccgtgggctgtgccaagtgtgcccagggctgcgtctgcaaaggggcatcggagaagtgcagctgctgtgcctgatgtgggaacagctcttctcccagatgtaaatagaacaacctgcacaacctggatttttttaaaaatacaacactgagccatttgctgcatttctttttatactaaatatgtgactgacaataaaaacaattttgactttaatcttactccctgttcttct

SEQ ID NO: 50 - DNA, 4171 bp, Homo sapiens
gggccgcctctgcacgtccgccccggagcccgcacccgcgccccacgcgccgccgaggactcggcccggctcgtggagcccttcgcccgcggcgtgagtacccccgacccgcccgtccccgctctgctcgcgccctgccgctgcgccgccctcggtggcttttccgacgggcgagccccgtgctgtgcgggaaagaatccgacaacttcgcagcccatcccggctggacgcgaccgggagtgcagcagcccgttcccctcctcggtgccgcctctgcccagcgtttgcttggctgggctaccacctgcgctcggacggcgctcggagggtcctcgcccccggcctgcctacctgaaaaccagaactgatggctctatttgcagtctttcagacaacattcttcttaacattgctgtccttgaggacttaccagagtgaagtcttggctgaacgtttaccattgactcctgtatcacttaaagtttccaccaattctacgcgtcagagtttgcacttacaatggactgtccacaaccttccttatcatcaggaattgaaaatggtatttcagatccagatcagtaggattgaaacatccaatgtcatctgggtggggaattacagcaccactgtgaagtggaaccaggttctgcattggagctgggaatctgagctccctttggaatgtgccacacactttgtaagaataaagagtttggtggacgatgccaagttccctgagccaaatttctggagcaactggagttcctgggaggaagtcagtgtacaagattctactggacaggatatattgttcgttttccctaaagataagctggtggaagaaggcaccaatgttaccatttgttacgtttctaggaacattcaaaataatgtatcctgttatttggaagggaaacagattcatggagaacaacttgatccacatgtaactgcattcaacttgaatagtgtgcctttcattaggaataaagggacaaatatctattgtgaggcaagtcaaggaaatgtcagtgaaggcatgaaaggcatcgttctttttgtctcaaaagtacttgaggagcccaaggacttttcttgtgaaaccgaggacttcaagactttgcactgtacttgggatcctgggacggacactgccttggggtggtctaaacaaccttcccaaagctacactttatttgaatcattttctggggaaaagaaactttgtacacacaaaaactggtgtaattggcaaataactcaagactcacaagaaacctataacttcacactcatagctgaaaattacttaaggaagagaagtgtcaatatcctttttaacctgactcatcgagtttatttaatgaatccttttagtgtcaactttgaaaatgtaaatgccacaaatgccatcatgacctggaaggtgcactccataaggaataatttcacatatttgtgtcagattgaactccatggtgaaggaaaaatgatgcaatacaatgtttccatcaaggtgaacggtgagtacttcttaagtgaactggaacctgccacagagtacatggcgcgagtacggtgtgctgatgccagccacttctggaaatggagtgaatggagtggtcagaacttcaccacacttgaagctgctccctcagaggcccctgatgtctggagaattgtgagcttggagccaggaaatcatactgtgaccttattctggaagccattatcaaaactgcatgccaatggaaagatcctgttctataatgtagttgtagaaaacctagacaaaccatccagttcagagctccattccattccagcaccagccaacagcacaaaactaatccttgacaggtgttcctaccaaatctgcgtcatagccaacaacagtgtgggtgcttctcctgcttctgtaatagtcatctctgcagaccccgaaaacaaagaggttgaggaagaaagaattgcaggcacagagggtggattctctctgtcttggaaaccccaacctggagatgttataggctatgttgtggactggtgtgaccatacccaggatgtgctcggtgatttccagtggaagaatgtaggtcccaataccacaagcacagtcattagcacagatgcttttaggccaggagttcgatatgacttcagaatttatgggttatctacaaaaaggattgcttgtttattagagaaaaaaacaggatactctcaggaacttgctccttcagacaaccctcacgtgctggtggatacattgacatcccactccttcactctgagttggaaagattactctactgaatctcaacctggttttatacaagggtaccatgtctatctgaaatccaaggcgaggcagtgccacccacgatttgaaaaggcagttctttcagatggttcagaatgttgcaaatacaaaattgacaacccggaagaaaaggcattgattgtggacaacctaaagccagaatccttctatgagtttttcatcactccattcactagtgctggtgaaggccccagtgctacgttcacgaaggtcacgactccggatgaacactcctcgatgctgattcatatcctactgcccatggttttctgcgtcttgctcatcatggtcatgtgctacttgaaaagtcagtggatcaaggagacctgttatcctgacatccctgacccttacaagagcagcatcctgtcattaataaaattcaaggagaaccctcacctaataataatgaatgtcagtgactgtatcccagatgctattgaagttgtaagcaagccagaagggacaaagatacagttcctaggcactaggaagtcactcacagaaaccgagttgactaagcctaactacctttatctccttccaacagaaaagaatcactctggccctggcccctgcatctgttttgagaacttgacctataaccaggcagcttctgactctggctcttgtggccatgttccagtatccccaaaagccccaagtatgctgggactaatgacctcacctgaaaatgtactaaaggcactagaaaaaaactacatgaactccctgggagaaatcccagctggagaaacaagtttgaattatgtgtcccagttggcttcacccatgtttggagacaaggacagtctcccaacaaacccagtagaggcaccacactgttcagagtataaaatgcaaatggcagtctccctgcgtcttgccttgcctcccccgaccgagaatagcagcctctcctcaattacccttttagatccaggtgaacactactgctaaccagcatgccgatttcataccttatgctacacagacattaagaagagcagagctggcaccctgtcatcaccagtggccttggtccttaatcccagtacaatttgcaggtctggtttatataagaccactacagtctggctaggttaaaggccagaggctatggaacttaacactccccattggagcaagcttgccctagagacggcaggatcatgggagcatgcttaccttctgctgtttgttccaggctcacctttagaacaggagacttgagcttgacctaaggatatgcattaaccactctacagactcccactcagtactgtacagggtggctgtggtcctagaagttcagtttttactgaggaaatatttccattaacagcaattattatattgaaggctttaataaaggccacaggagacattactatagcatagattgtcaaatgtaaatttactgagcgtgttttataaaaaactcacaggtgtttgaggccaaaacagattttagacttaccttgaacggataagaatctatagttcactgacacagtaaaattaactctgtgggtgggggcggggggcatagctctaatctaatatataaaatgtgtgatgaatcaacaagatttccacaattcttctgtcaagcttactacagtgaaagaatgggattggcaagtaacttctgacttactgtcagttgtacttctgctccatagacatcagtattctgccatcatttttgatgactacctcagaacataaaaaggaacgtatatcacataattccagtcacagtttttggttcctcttttctttcaagaactatatataaatgacctgttttcacgcggccgc

SEQ ID NO: 51 - DNA, 4100 bp, Homo sapiens
gtacctcatgtgacaagttccaatttcttttcaagtcaattgaactgaaatctccttgttgctttgaaatcttagaagagagcccactaattcaaggactcttactgtgggagcaactgctggttctatcacaatgaaacggctggtttgtgtgctcttggtgtgctcctctgcagtggcacagttgcataaagatcctaccctggatcaccactggcatctctggaagaaaacctatggcaaacaatacaaggaaaagaatgaagaagcagtacgacgtctcatctgggaaaagaatctaaagtttgtgatgcttcacaacctggagcattcaatgggaatgcactcatacgatctgggcatgaaccacctgggagacatgaccagtgaagaagtgatgtctttgatgagttccctgagagttcccagccagtggcagagaaatatcacatataagtcaaaccctaatcggatattgcctgattctgtggactggagagagaaagggtgtgttactgaagtgaaatatcaaggttcttgtggtgcttgctgggctttcagtgctgtgggggccctggaagcacagctgaagctgaaaacaggaaagctggtgtctctcagtgcccagaacctggtggattgctcaactgaaaaatatggaaacaaaggctgcaatggtggcttcatgacaacggctttccagtacatcattgataacaagggcatcgactcagacgcttcctatccctacaaagccatggatcagaaatgtcaatatgactcaaaatatcgtgctgccacatgttcaaagtacactgaacttccttatggcagagaagatgtcctgaaagaagctgtggccaataaaggcccagtgtctgttggtgtagatgcgcgtcatccttctttcttcctctacagaagtggtgtctactatgaaccatcctgtactcagaatgtgaatcatggtgtacttgtggttggctatggtgatcttaatgggaaagaatactggcttgtgaaaaacagctggggccacaactttggtgaagaaggatatattcggatggcaagaaataaaggaaatcattgtgggattgctagctttccctcttacccagaaatctagaggatctctcctttttataacaaatcaagaaatatgaagcactttctcttaacttaatttttcctgctgtatccagaagaaataattgtgtcatgattaatgtgtatttactgtactaattagaaaatatagtttgaggccgggcacggtggctcacgcctgtaatcccagtacttgggaggccaaggcaggcatatcaacttgaggccaggagttaaagagcagcctggctaacatggtgaaaccccatctctactaaaaatacaaaaaattagccgagcacggtggtgcatgcctgtaatcccagctacttgggaggctgaggcacgagattccttgaacccaagaggttgaggctatgttgagctgagatcacaccactgtactccagcctggatgacagagtggagactctgtttcaaaaaaacagaaaagaaaatatagtttgattcttcatttttttaaatttgcaaatctcaggataaagtttgctaagtaaattagtaatgtactatagatataactgtacaaaaattgttcaacctaaaacaatctgtaattgcttattgttttattgtatactctttgtctttttaagacccctaatagccttttgtaacttgatggcttaaaaatacttaataaatctgccatttcaaatttctatcattgccacataccattcttattcctaggcaactattaataatctatcctgagaatattaattgtggtattctggtgatggggtttagcaactttgatggaagaaaatattaggctataaatgtcctaaggactcagattgtatctttgtacagaagaggattcaaaacgccacgtgtagtggctcatgcctgtaatcccaacactttgggaggctgaagtaggaggatcgtcttgagcccaggagttcaagaccagcctggacaacatagtgagaccttgtctccacaaaaataaaaaagaaactatccaggagtggtggtgtgtgcctgtggtccctgctatgcagatgtctaagacaggaggatcacaagagcccaggaggttgagaatgcagtgagcttgtaattgcaccactgcactccagcctgggtgacagagcaagaccctgtcttaaaaaaagaggattcaacacatatttttatattatgttaaagtaaagaaatgcataaaagacaagcactttggaagaattattttaatgatcaacaatttaatgtattagtccaaattatttttacgtagtcatcaacaatttgaccagggcctttatttggcaaataactgagccaaccagaataaaataaccaatactccactgctcatatttttatctaattcagatggatcttccttacaactgctctagattagtagatgcatctaagcaggcagcaggaactttaaattttttaagttcatgtctatgacatgaacaatgtgtgggataatgtcattaatatatcctaaattaacctaaacgtatttcactaactctggctccttctccataaagcacattttaaggaacaagaattgctaaatataaaaacataaataataccataatacatggctatcatcaaaagtgtatagaatattatagtttaaaagtatttagttgattacttttcagttttgttttgttttttgagacggagtctcactctgttgcccaggctggagtgcagtggcaccatctcagttcactgcaacttctgcctcccgagttcaagcgattctcctgcctcagcctcccgagtagctggaattataggcgtgcaccaccacgcccagctaatttttgtatttttagtaaagacagggttttgccacattagccaggctggtctcaaactcctgacctcaggtgatccacccaccccagcctcccaaagtgctaagattacaggcgtgagccactgagcccagcctacttttcagtttttaacataatttttgttttatccacaacttttcaagtattgaaagtagaataaaaacatgggttcttagtctttagctatctgttaaagcctatgaatgccttcttaaaatcatgtttttaaatgcataaaatatataggattacaaaggaatctaattatatcgaaatacagttattaaaatgttaaaagataagtttgttatatattaatatgcatgcttctttataaatgcattaaataagagttaatagctatcctaaatttgaaatagtgataagcataatgaaaatagatgcaaaaaactaatgtgatatgaaaatatctgggtttttcttttgatgatgaagtattgctaatattaccgtggtttatgaactatgttcagaattgaagaaaatcctaactttcagttagaggttagtgacggggttcaggacaccctacacaaaatacagcactttgacatattgaatattttaagctgaaggcatttgaggaaattgcagaagcaggaaggtgactctgaccttctgcctgctgttctccccagaagcagccataaaacctgggaaggattttctgaccttcccctgaagtagatcataagactgtcatgtaagaggtgctctcctggcacccagagaaaaggagcatccttacctccaaaagcacagggacacaaagaggaatctaaacaaacaggcctctcagtttcccccagtttattacatttagcttgttcacactttgccctatgacatttctacatcactggctgctcttcatcaaacctactataaaaaacattcaagttcaactgtttctttgggcctttatttccttatggagcccctcgtgtcgtgtaaaacttatattaaataaatgtgcatgcttttctcttgctaatctctcttttgttatagagatctcagccctaaacctaggatggatagaaggaaacatatgttctcccctacattagtaaaaataaaaatggaattttttacccatacaaa

SEQ ID NO: 52 - DNA, 3865 bp, Homo sapiens
cggcagggttggaaaatgatggaagaggcggaggtggaggcgaccgagtgctgagaggaacctgcggaatcggccgagatggggtctggcgcgcgctttccctcggggacccttcgtgtccggtggttgctgttgcttggcctggtgggcccagtcctcggtgcggcgcggccaggctttcaacagacctcacatctttcttcttatgaaattataactccttggagattaactagagaaagaagagaagcccctaggccctattcaaaacaagtatcttatgttattcaggctgaaggaaaagagcatattattcacttggaaaggaacaaagaccttttgcctgaagattttgtggtttatacttacaacaaggaagggactttaatcactgaccatcccaatatacagaatcattgtcattatcggggctatgtggagggagttcataattcatccattgctcttagcgactgttttggactcagaggattgctgcatttagagaatgcgagttatgggattgaacccctgcagaacagctctcattttgagcacatcatttatcgaatggatgatgtctacaaagagcctctgaaatgtggagtttccaacaaggatatagagaaagaaactgcaaaggatgaagaggaagagcctcccagcatgactcagctacttcgaagaagaagagctgtcttgccacagacccggtatgtggagctgttcattgtcgtagacaaggaaaggtatgacatgatgggaagaaatcagactgctgtgagagaagagatgattctcctggcaaactacttggatagtatgtatattatgttaaatattcgaattgtgctagttggactggagatttggaccaatggaaacctgatcaacatagttgggggtgctggtgatgtgctggggaacttcgtgcagtggcgggaaaagtttcttatcacacgtcggagacatgacagtgcacagctagttctaaagaaaggttttggtggaactgcaggaatggcatttgtgggaacagtgtgttcaaggagccacgcaggcgggattaatgtgtttggacaaatcactgtggagacatttgcttccattgttgctcatgaattgggtcataatcttggaatgaatcacgatgatgggagagattgttcctgtggagcaaagagctgcatcatgaattcaggagcatcgggttccagaaactttagcagttgcagtgcagaggactttgagaagttaactttaaataaaggaggaaactgccttcttaatattccaaagcctgatgaagcctatagtgctccctcctgtggtaataagttggtggacgctggggaagagtgtgactgtggtactccaaaggaatgtgaattggacccttgctgcgaaggaagtacctgtaagcttaaatcatttgctgagtgtgcatatggtgactgttgtaaagactgtcggttccttccaggaggtactttatgccgaggaaaaaccagtgagtgtgatgttccagagtactgcaatggttcttctcagttctgtcagccagatgtttttattcagaatggatatccttgccagaataacaaagcctattgctacaacggcatgtgccagtattatgatgctcaatgtcaagtcatctttggctcaaaagccaaggctgcccccaaagattgtttcattgaagtgaattctaaaggtgacagatttggcaattgtggtttctctggcaatgaatacaagaagtgtgccactgggaatgctttgtgtggaaagcttcagtgtgagaatgtacaagagatacctgtatttggaattgtgcctgctattattcaaacgcctagtcgaggcaccaaatgttggggtgtggatttccagctaggatcagatgttccagatcctgggatggttaacgaaggcacaaaatgtggtgctggaaagatctgtagaaacttccagtgtgtagatgcttctgttctgaattatgactgtgatgttcagaaaaagtgtcatggacatggggtatgtaatagcaataagaattgtcactgtgaaaatggctgggctcccccaaattgtgagactaaaggatacggaggaagtgtggacagtggacctacatacaatgaaatgaatactgcattgagggacggacttctggtcttcttcttcctaattgttccccttattgtctgtgctatttttatcttcatcaagagggatcaactgtggagaagctacttcagaaagaagagatcacaaacatatgagtcagatggcaaaaatcaagcaaacccttctagacagccggggagtgttcctcgacatgtttctccagtgacacctcccagagaagttcctatatatgcaaacagatttgcagtaccaacctatgcagccaagcaacctcagcagttcccatcaaggccacctccaccacaaccgaaagtatcatctcagggaaacttaattcctgcccgtcctgctcctgcacctcctttatatagttccctcacttgatttttttaaccttctttttgcaaatgtcttcagggaactgagctaatactttttttttttcttgatgttttcttgaaaagcctttctgttgcaactatgaatgaaaacaaaacaccacaaaacagacttcactaacacagaaaaacagaaactgagtgtgagagttgtgaaatacaaggaaatgcagtaaagccagggaatttacaataacatttccgtttccatcattgaataagtcttattcagtcatcggtgaggttaatgcactaatcatggattttttgaacatgttattgcagtgattctcaaattaactgtattggtgtaagatttttgtcattaagtgtttaagtgttattctgaattttctaccttagttatcattaatgtagttcctcattgaacatgtgataatctaatacctgtgaaaactgactaatcagctgccaataatatctaatatttttcatcatgcacgaattaataatcatcatactctagaatcttgtctgtcactcactacatgaataagcaaatattgtcttcaaaagaatgcacaagaaccacaattaagatgtcatattattttgaaagtacaaaatatactaaaagagtgtgtgtgtattcacgcagttactcgcttccatttttatgacctttcaactataggtaataactcttagagaaattaatttaatattagaatttctattatgaatcatgtgaaagcatgacattcgttcacaatagcactattttaaataaattataagctttaaggtacgaagtatttaatagatctaatcaaatatgttgattcatggctataataaagcaggagcaattataaaatcttcaatcaattgaacttttacaaaaccacttgagaatttcatgagcactttaaaatctgaactttcaaagcttgctattaaatcatttagaatgtttacatttactaaggtgtgctgggtcatgtaaaatattagacactaatattttcatagaaattaggctggagaaagaaggaagaaatggttttcttaaatacctacaaaaaagttactgtggtatctatgagttatcatcttagctgtgttaaaaatgaatttttactatggcagatatggtatggatcgtaaaattttaagcactaaaaattttttcataacctttcataataaagtttaataataggtttattaactgaatttcattagttttttaaaagtgtttttggtttgtgtatatatacatatacaaatacaacatttacaataaataaaatacttgaaattctcaaaaaaaaaaaaaaaaaaaaaaaaaa

SEQ ID NO: 53 - DNA, 428 bp, Homo sapiens
atgtctcttgtcagctgtctttcagaagacctggtggggcaagtccgtgggcatcatgttgaccgagctggagaaagccttgaactctatcatcgacgtctaccacaagtactccctgataaaggggaatttccatgccgtctacagggatgacctgaagaaattgctagagaccgagtgtcctcagtatatcaggaaaaagggtgcagacgtctggttcaaagagttggatatcaacactgatggtgcagttaacttccaggagttcctcattctggtgataaagatgggcgtggcagcccacaaaaaaagccatgaagaaagccacaaagagtagctgagttactgggcccagaggctgggcccctggacatgtacctgcagaataataaagtcatcaatacctcaaaaaaaaaaaaaaaaaaaaa

SEQ ID NO: 54 - DNA, 1202 bp, Homo sapiens
ggcacgaggcgccatttgctgccgccgagcgtggacgcaggcggatctctgaagagctgggtcgccagcctctcccgcgcacgttgcctggcctccagcacctacttggtcccgcgcgctccctcgtgtcgcccctcggagcagcagccgccgcggtcgccgctacccggaaagaagtcagagacgccgcgagtcgccgccaccgccatgcccaagaataaaggtaaaggaggtaaaaacagacgcaggggtaagaatgagaatgaatctgaaaaaagagaactggtattcaaagaggatgggcaggagtatgctcaggtaatcaaaatgttgggaaatggacggctagaagcaatgtgtttcgatggtgtaaagaggttatgtcacatcagaggaaaattgagaaaaaaggtttggataaatacctcggacattattttggttggtctccgagactaccaggataacaaagctgatgtaattttaaaatacaatgcagacgaagctagaagtctgaaggcatacggcgagcttccagagcatgctaaaatcaatgaaactgatacatttggtcctggagatgatgatgaaattcagtttgatgacattggagatgatgatgaagatattgatgacatctaaattgaactcaacattttacattccatcttttctgaagattgtcctacaatttggattttgatcatgacaaagaagattaaaatttcattagcatgaatgcaatttgttaaagcagactgatttgtttctaagatatttttggtttttttaaaactgataataatgctgaattatcttaagtgagatgttaagcccactttgttcttttaatgtaatggagcttatgggtagaagaccatgtctactaattacaaaaaaaaaaaaaaaccatgattgctgcttttcctaccacttccagtaagaaaatgggtgttttgaagaaatcatttgccttgtctcacggaatctgattaagccctggcctcttgatgtatagagtcatggatattccagttacctagatattcccttgagattttgatacaatttgagggaggcagaagtctgcagttgaagaaaaaaaataagtctgtttgtcatatttaagtagcctgtgcgtatttttatactgattttgatatcatgttcttttcatagtcgtattttgccaccgtaaacat

SEQ ID NO: 55 - DNA, 2577 bp, Homo sapiens
cacatgtcggcgcaggcggccaaagtcagtaaaaaggagctcaactccaaccacgacggggccgacgagacctcagaaaaagaacagcaagaagcgattgaacacattgatgaagtacaaaatgaaatagacagacttaatgaacaagccagtgaggagattttgaaagtagaacagaaatataacaaactccgccaaccattttttcagaagaggtcagaattgatcgccaaaatcccaaatttttgggtaacaacatttgtcaaccatccacaagtgtctgcactgcttggggaggaagatgaagaggcactgcattatttgaccagagttgaagtgacagaatttgaagatattaaatcaggttacagaatagatttttattttgatgaaaatccttactttgaaaataaagttctctccaaagaatttcatctgaatgagagtggtgatccatcttcgaagtccaccgaaatcaaatggaaatctggaaaggatttgacgaaacgttcgagtcaaacgcagaataaagccagcaggaagaggcagcatgaggaaccagagagcttctttacctggtttactgaccattctgatgcaggtgctgatgagttaggagaggtcatcaaagatgatatttggccaaacccattacagtactacttggttcccgatatggatgatgaagaaggagaaggagaagaagatgatgatgatgatgaagaggaggaaggattagaagatattgacgaagaaggggatgaggatgaaggtgaagaagatgaagatgatgatgaaggggaggaaggagaggaggatgaaggagaagatgactaaatagaacactgatggattccaaccttcctttttttaaattttctccagtccctgggagcaagttgcagtctttttttttttttttttttttttccctcttgtgctcagtcgccctgttcttgaggtctcttttctctactccatggttctcaatttatttggggggaaataccttgagcagaatacaatgggaaaagagtctctacccctttctgttcgaagttcatttttatcccttcctgtctgaacaaaaactgtatggaatcaacaccaccgagctctgtgggaaaaaagaaaaacctgctccctttgctctgctggaagctggagggtgctaggcccctgtgtagtagtgtatagaattctagcttttttcctcctttctctgtatattgggctcagagagtacactgtgtctctatgtgaatatggacagttagcatttaccaacatgtatctgtctactttctcttgtttaaaaaaagaaaaaaaaacttaaaaaaatggggttatagaaggtcagcaaaggggtggggtttgagatgtttgggtgggttagtgggcattttgacaacatggcttctcctttggcatgtttaattgtgatatttgacagacatccttgcagtttaagatgacacttttaaaataaattctctcctaatgatgacttgagccctgccactcaatgggagaatcagcagaacctgtaggatcttatttggaattgacattctctattgtaattttgttcctgtttatttttgggtttctttttgtttcactggaaaggaaagatgatgctcagttttaaacgttaaaagtgtacaagttgctttgttacaataaaactaaatgtgtacacaaaggatttgatgcttttctctcagcataggtatgcttactatgaccttccaagtttgacttgtataacatcactgtcaaactttgtcaccctaacttcgtattttttgatacgcacttttgcaggatgacctcagggctatgtggattgagtaatgggatttgaatcaatgtattaatatctccatagctgggaaacgtgggttcaatttgccattggtttctgaaaagtattcacatcatttgggataccagatagctcaatactctctgagtacattgtgcccttgatttttatctccaagtggcagtttttaaaattggccttttacctggatataaattaattgtgcctgccaccaccatccaacagacctggtgctctaatgccaagttatacacgggacagttgctggcatgtcttcattggctctctaaaatgtggccaagaagataggctctcagtaagaagtctgatggtgagcagtaactgtccctgctttctggtataaagctctcaaatgtgaccatgtgaatctgggtgggataatggactcagctctgtctgctcaatgccattgtgcagagaagcaccctaatgcataagctttttaatgctgtaaaatatagtcgctgaaattaaatgccactttttcagaggtgaattaatggacagtctggtgaacttcaaaagctttttgatgtataaaacttgataaatggaactattccatcaataggcaaaagtgtaacaacctatctagatggatagtatgtaatttctgcacaggtctctgtttagtaaatacatcactgtataccgatcaggaatcttgctccaataaaggaacataaagatttaaaaaaaaaaaaaaa

SEQ ID NO: 56 - DNA, 10412 bp, Homo sapiens
gtaattgcgagcgagagtgagtggggccgggacccgcagagccgagccgacccttctctcccgggctgcggcagggcagggcggggagctccgcgcaccaacagagccggttctcagggcgctttgctccttgttttttccccggttctgttttctccccttctccggaaggcttgtcaaggggtaggagaaagagacgcaaacacaaaagtggaaaacagttaatgaccagccacggcgtccctgctgtgagctctggccgctgccttccagggctcccgagccacacgctgggggtgctggctgagggaacatggcttgttggcctcagctgaggttgctgctgtggaagaacctcactttcagaagaagacaaacatgtcagctgctgctggaagtggcctggcctctatttatcttcctgatcctgatctctgttcggctgagctacccaccctatgaacaacatgaatgccattttccaaataaagccatgccctctgcaggaacacttccttgggttcaggggattatctgtaatgccaacaacccctgtttccgttacccgactcctggggaggctcccggagttgttggaaactttaacaaatccattgtggctcgcctgttctcagatgctcggaggcttcttttatacagccagaaagacaccagcatgaaggacatgcgcaaagttctgagaacattacagcagatcaagaaatccagctcaaacttgaagcttcaagatttcctggtggacaatgaaaccttctctgggttcctgtatcacaacctctctctcccaaagtctactgtggacaagatgctgagggctgatgtcattctccacaaggtatttttgcaaggctaccagttacatttgacaagtctgtgcaatggatcaaaatcagaagagatgattcaacttggtgaccaagaagtttctgagctttgtggcctaccaagggagaaactggctgcagcagagcgagtacttcgttccaacatggacatcctgaagccaatcctgagaacactaaactctacatctcccttcccgagcaaggagctggctgaagccacaaaaacattgctgcatagtcttgggactctggcccaggagctgttcagcatgagaagctggagtgacatgcgacaggaggtgatgtttctgaccaatgtgaacagctccagctcctccacccaaatctaccaggctgtgtctcgtattgtctgcgggcatcccgagggaggggggctgaagatcaagtctctcaactggtatgaggacaacaactacaaagccctctttggaggcaatggcactgaggaagatgctgaaaccttctatgacaactctacaactccttactgcaatgatttgatgaagaatttggagtctagtcctctttcccgcattatctggaaagctctgaagccgctgctcgttgggaagatcctgtatacacctgacactccagccacaaggcaggtcatggctgaggtgaacaagaccttccaggaactggctgtgttccatgatctggaaggcatgtgggaggaactcagccccaagatctggaccttcatggagaacagccaagaaatggaccttgtccggatgctgttggacagcagggacaatgaccacttttgggaacagcagttggatggcttagattggacagcccaagacatcgtggcgtttttggccaagcacccagaggatgtccagtccagtaatggttctgtgtacacctggagagaagctttcaacgagactaaccaggcaatccggaccatatctcgcttcatggagtgtgtcaacctgaacaagctagaacccatagcaacagaagtctggctcatcaacaagtccatggagctgctggatgagaggaagttctgggctggtattgtgttcactggaattactccaggcagcattgagctgccccatcatgtcaagtacaagatccgaatggacattgacaatgtggagaggacaaataaaatcaaggatgggtactgggaccctggtcctcgagctgacccctttgaggacatgcggtacgtctgggggggcttcgcctacttgcaggatgtggtggagcaggcaatcatcagggtgctgacgggcaccgagaagaaaactggtgtctatatgcaacagatgccctatccctgttacgttgatgacatctttctgcgggtgatgagccggtcaatgcccctcttcatgacgctggcctggatttactcagtggctgtgatcatcaagggcatcgtgtatgagaaggaggcacggctgaaagagaccatgcggatcatgggcctggacaacagcatcctctggtttagctggttcattagtagcctcattcctcttcttgtgagcgctggcctgctagtggtcatcctgaagttaggaaacctgctgccctacagtgatcccagcgtggtgtttgtcttcctgtccgtgtttgctgtggtgacaatcctgcagtgcttcctgattagcacactcttctccagagccaacctggcagcagcctgtgggggcatcatctacttcacgctgtacctgccctacgtcctgtgtgtggcatggcaggactacgtgggcttcacactcaagatcttcgctagcctgctgtctcctgtggcttttgggtttggctgtgagtactttgccctttttgaggagcagggcattggagtgcagtgggacaacctgtttgagagtcctgtggaggaagatggcttcaatctcaccacttcggtctccatgatgctgtttgacaccttcctctatggggtgatgacctggtacattgaggctgtctttccaggccagtacggaattcccaggccctggtattttccttgcaccaagtcctactggtttggcgaggaaagtgatgagaagagccaccctggttccaaccagaagagaatatcagaaatctgcatggaggaggaacccacccacttgaagctgggcgtgtccattcagaacctggtaaaagtctaccgagatgggatgaaggtggctgtcgatggcctggcactgaatttttatgagggccagatcacctccttcctgggccacaatggagcggggaagacgaccaccatgtcaatcctgaccgggttgttccccccgacctcgggcaccgcctacatcctgggaaaagacattcgctctgagatgagcaccatccggcagaacctgggggtctgtccccagcataacgtgctgtttgacatgctgactgtcgaagaacacatctggttctatgcccgcttgaaagggctctctgagaagcacgtgaaggcggagatggagcagatggccctggatgttggtttgccatcaagcaagctgaaaagcaaaacaagccagctgtcaggtggaatgcagagaaagctatctgtggccttggcctttgtcgggggatctaaggttgtcattctggatgaacccacagctggtgtggacccttactcccgcaggggaatatgggagctgctgctgaaataccgacaaggccgcaccattattctctctacacaccacatggatgaagcggacgtcctgggggacaggattgccatcatctcccatgggaagctgtgctgtgtgggctcctccctgtttctgaagaaccagctgggaacaggctactacctgaccttggtcaagaaagatgtggaatcctccctcagttcctgcagaaacagtagtagcactgtgtcatacctgaaaaaggaggacagtgtttctcagagcagttctgatgctggcctgggcagcgaccatgagagtgacacgctgaccatcgatgtctctgctatctccaacctcatcaggaagcatgtgtctgaagcccggctggtggaagacatagggcatgagctgacctatgtgctgccatatgaagctgctaaggagggagcctttgtggaactctttcatgagattgatgaccggctctcagacctgggcatttctagttatggcatctcagagacgaccctggaagaaatattcctcaaggtggccgaagagagtggggtggatgctgagacctcagatggtaccttgccagcaagacgaaacaggcgggccttcggggacaagcagagctgtcttcgcccgttcactgaagatgatgctgctgatccaaatgattctgacatagacccagaatccagagagacagacttgctcagtgggatggatggcaaagggtcctaccaggtgaaaggctggaaacttacacagcaacagtttgtggcccttttgtggaagagactgctaattgccagacggagtcggaaaggattttttgctcagattgtcttgccagctgtgtttgtctgcattgcccttgtgttcagcctgatcgtgccaccctttggcaagtaccccagcctggaacttcagccctggatgtacaacgaacagtacacatttgtcagcaatgatgctcctgaggacacgggaaccctggaactcttaaacgccctcaccaaagaccctggcttcgggacccgctgtatggaaggaaacccaatcccagacacgccctgccaggcaggggaggaagagtggaccactgccccagttccccagaccatcatggacctcttccagaatgggaactggacaatgcagaacccttcacctgcatgccagtgtagcagcgacaaaatcaagaagatgctgcctgtgtgtcccccaggggcaggggggctgcctcctccacaaagaaaacaaaacactgcagatatccttcaggacctgacaggaagaaacatttcggattatctggtgaagacgtatgtgcagatcatagccaaaagcttaaagaacaagatctgggtgaatgagtttaggtatggcggcttttccctgggtgtcagtaatactcaagcacttcctccgagtcaagaagttaatgatgccatcaaacaaatgaagaaacacctaaagctggccaaggacagttctgcagatcgatttctcaacagcttgggaagatttatgacaggactggacaccaaaaataatgtcaaggtgtggttcaataacaagggctggcatgcaatcagctctttcctgaatgtcatcaacaatgccattctccgggccaacctgcaaaagggagagaaccctagccattatggaattactgctttcaatcatcccctgaatctcaccaagcagcagctctcagaggtggctctgatgaccacatcagtggatgtccttgtgtccatctgtgtcatctttgcaatgtccttcgtcccagccagctttgtcgtattcctgatccaggagcgggtcagcaaagcaaaacacctgcagttcatcagtggagtgaagcctgtcatctactggctctctaattttgtctgggatatgtgcaattacgttgtccctgccacactggtcattatcatcttcatctgcttccagcagaagtcctatgtgtcctccaccaatctgcctgtgctagcccttctacttttgctgtatgggtggtcaatcacacctctcatgtacccagcctcctttgtgttcaagatccccagcacagcctatgtggtgctcaccagcgtgaacctcttcattggcattaatggcagcgtggccacctttgtgctggagctgttcaccgacaataagctgaataatatcaatgatatcctgaagtccgtgttcttgatcttcccacatttttgcctgggacgagggctcatcgacatggtgaaaaaccaggcaatggctgatgccctggaaaggtttggggagaatcgctttgtgtcaccattatcttgggacttggtgggacgaaacctcttcgccatggccgtggaaggggtggtgttcttcctcattactgttctgatccagtacagattcttcatcaggcccagacctgtaaatgcaaagctatctcctctgaatgatgaagatgaagatgtgaggcgggaaagacagagaattcttgatggtggaggccagaatgacatcttagaaatcaaggagttgacgaagatatatagaaggaagcggaagcctgctgttgacaggatttgcgtgggcattcctcctggtgagtgctttgggctcctgggagttaatggggctggaaaatcatcaactttcaagatgttaacaggagataccactgttaccagaggagatgctttccttaacaaaaatagtatcttatcaaacatccatgaagtacatcagaacatgggctactgccctcagtttgatgccatcacagagctgttgactgggagagaacacgtggagttctttgcccttttgagaggagtcccagagaaagaagttggcaaggttggtgagtgggcgattcggaaactgggcctcgtgaagtatggagaaaaatatgctggtaactatagtggaggcaacaaacgcaagctctctacagccatggctttgatcggcgggcctcctgtggtgtttctggatgaacccaccacaggcatggatcccaaagcccggcggttcttgtggaattgtgccctaagtgttgtcaaggaggggagatcagtagtgcttacatctcatagtatggaagaatgtgaagctctttgcactaggatggcaatcatggtcaatggaaggttcaggtgccttggcagtgtccagcatctaaaaaataggtttggagatggttatacaatagttgtacgaatagcagggtccaacccggacctgaagcctgtccaggatttctttggacttgcatttcctggaagtgttctaaaagagaaacaccggaacatgctacaataccagcttccatcttcattatcttctctggccaggatattcagcatcctctcccagagcaaaaagcgactccacatagaagactactctgtttctcagacaacacttgaccaagtatttgtgaactttgccaaggaccaaagtgatgatgaccacttaaaagacctctcattacacaaaaaccagacagtagtggacgttgcagttctcacatcttttctacaggatgagaaagtgaaagaaagctatgtatgaagaatcctgttcatacggggtggctgaaagtaaagaggaactagactttcctttgcaccatgtgaagtgttgtggagaaaagagccagaagttgatgtgggaagaagtaaactggatactgtactgatactattcaatgcaatgcaattcaatgcaatgaaaacaaaattccattacaggggcagtgcctttgtagcctatgtcttgtatggctctcaagtgaaagacttgaatttagttttttacctatacctatgtgaaactctattatggaacccaatggacatatgggtttgaactcacacttttttttttttttttgttcctgtgtattctcattggggttgcaacaataattcatcaagtaatcatggccagcgattattgatcaaaatcaaaaggtaatgcacatcctcattcactaagccatgccatgcccaggagactggtttcccggtgacacatccattgctggcaatgagtgtgccagagttattagtgccaagtttttcagaaagtttgaagcaccatggtgtgtcatgctcacttttgtgaaagctgctctgctcagagtctatcaacattgaatatcagttgacagaatggtgccatgcgtggctaacatcctgctttgattccctctgataagctgttctggtggcagtaacatgcaacaaaaatgtgggtgtctccaggcacgggaaacttggttccattgttatattgtcctatgcttcgagccatgggtctacagggtcatccttatgagactcttaaatatacttagatcctggtaagaggcaaagaatcaacagccaaactgctggggctgcaagctgctgaagccagggcatgggattaaagagattgtgcgttcaaacctagggaagcctgtgcccatttgtcctgactgtctgctaacatggtacactgcatctcaagatgtttatctgacacaagtgtattatttctggctttttgaattaatctagaaaatgaaaagatggagttgtattttgacaaaaatgtttgtactttttaatgttatttggaattttaagttctatcagtgacttctgaatccttagaatggcctctttgtagaaccctgtggtatagaggagtatggccactgccccactatttttattttcttatgtaagtttgcatatcagtcatgactagtgcctagaaagcaatgtgatggtcaggatctcatgacattatatttgagtttctttcagatcatttaggatactcttaatctcacttcatcaatcaaatattttttgagtgtatgctgtagctgaaagagtatgtacgtacgtataagactagagagatattaagtctcagtacacttcctgtgccatgttattcagctcactggtttacaaatataggttgtcttgtggttgtaggagcccactgtaacaatactgggcagcctttttttttttttttttaattgcaacaatgcaaaagccaagaaagtataagggtcacaagtctaaacaatgaattcttcaacagggaaaacagctagcttgaaaacttgctgaaaaacacaacttgtgtttatggcatttagtaccttcaaataattggctttgcagatattggataccccattaaatctgacagtctcaaatttttcatctcttcaatcactagtcaagaaaaatataaaaacaacaaatacttccatatggagcatttttcagagttttctaacccagtcttatttttctagtcagtaaacatttgtaaaaatactgtttcactaatacttactgttaactgtcttgagagaaaagaaaaatatgagagaactattgtttggggaagttcaagtgatctttcaatatcattactaacttcttccactttttccagaatttgaatattaacgctaaaggtgtaagacttcagatttcaaattaatctttctatattttttaaatttacagaatattatataacccactgctgaaaaagaaaaaaatgattgttttagaagttaaagtcaatattgattttaaatataagtaatgaaggcatatttccaataactagtgatatggcatcgttgcattttacagtatcttcaaaaatacagaatttatagaataatttctcctcatttaatatttttcaaaatcaaagttatggtttcctcattttactaaaatcgtattctaattcttcattatagtaaatctatgagcaactccttacttcggttcctctgatttcaaggccatattttaaaaaatcaaaaggcactgtgaactattttgaagaaaacacaacattttaatacagattgaaaggacctcttctgaagctagaaacaatctatagttatacatcttcattaatactgtgttaccttttaaaatagtaattttttacattttcctgtgtaaacctaattgtggtagaaatttttaccaactctatactcaatcaagcaaaatttctgtatattccctgtggaatgtacctatgtgagtttcagaaattctcaaaatacgtgttcaaaaatttctgcttttgcatctttgggacacctcagaaaacttattaacaactgtgaatatgagaaatacagaagaaaataataagccctctatacataaatgcccagcacaattcattgttaaaaaacaaccaaacctcacactactgtatttcattatctgtactgaaagcaaatgctttgtgactattaaatgttgcacatcattcattcactgtatagtaatcattgactaaagccatttgtctgtgttttcttcttgtggttgtatatatcaggtaaaatattttccaaagagccatgtgtcatgtaatactgaaccactttgatattgagacattaatttgtacccttgttattatctactagtaataatgtaatactgtagaaatattgctctaattcttttcaaaattgttgcatcccccttagaatgtttctatttccataaggatttaggtatgctattatcccttcttataccctaagatgaagctgtttttgtgctctttgttcatcattggccctcattccaagcactttacgctgtctgtaatgggatctatttttgcactggaatatctgagaattgcaaaactagacaaaagtttcacaacagatttctaagttaaatcattttcattaaaaggaaaaaagaaaaaaaattttgtatgtcaataactttatatgaagtattaaaatgcatatttctatgttgtaatataatgagtcacaaaataaagctgtgacagttctgttggtctacagaaa

SEQ ID NO: 57 - DNA, 7247 bp, Homo sapiens
gcgtccctcccagcggcgcgtgagcggcactgatttgtccctggggcggcagcgcggacccgcccggagatgaggcgtcgattagcaaggtaaaagtaacagaaccatggctcagtttccaacaccttttggtggcagcctggatatctgggccataactgtagaggaaagagcgaagcatgatcagcagttccatagtttaaagccaatatctggattcattactggtgatcaagctagaaactttttttttcaatctgggttacctcaacctgttttagcacagatatgggcactagctgacatgaataatgatggaagaatggatcaagtggagttttccatagctatgaaacttatcaaactgaagctacaaggatatcagctaccctctgcacttccccctgtcatgaaacagcaaccagttgctatttctagcgcaccaccatttggtatgggaggtatcgccagcatgccaccgcttacagctgttgctccagtgccaatgggatccattccagttgttggaatgtctccaaccctagtatcttctgttcccacagcagctgtgccccccctggctaacggggctccccctgttatacaacctctgcctgcatttgctcatcctgcagccacattgccaaagagttcttcctttagtagatctggtccagggtcacaactaaacactaaattacaaaaggcacagtcatttgatgtggccagtgtcccaccagtggcagagtgggctgttcctcagtcatcaaggctgaaatacaggcaattattcaatagtcatgacaaaactatgagtggacacttaacaggtccccaagcaagaactattcttatgcagtcaagtttaccacaggctcagctggcttcaatatggaatctttctgacattgatcaagatggaaaacttacagcagaggaatttatcctggcaatgcacctcattgatgtagctatgtctggccaaccactgccacctgtcctgcctccagaatacattccaccttcttttagaagagttcgatctggcagtggtatatctgtcataagctcaacatctgtagatcagaggctaccagaggaaccagttttagaagatgaacaacaacaattagaaaagaaattacctgtaacgtttgaagataaaaagcgggagaactttgaacgtggcaacctggaactggagaaacgaaggcaagctctcctggaacagcagcgcaaggagcaggagcgcctggcccagctggagcgggcggagcaggagaggaaggagcgtgagcgccaggagcaagagcgcaaaagacaactggaactggagaagcaactggaaaagcagcgggagctagaacggcagagagaggaggagaggaggaaagaaattgagaggcgagaggctgcaaaacgggaacttgaaaggcaacgacaacttgagtgggaacggaatcgaaggcaagaactactaaatcaaagaaacaaagaacaagaggacatagttgtactgaaagcaaagaaaaagactttggaatttgaattagaagctctaaatgataaaaagcatcaactagaagggaaacttcaagatatcagatgtcgattgaccacccaaaggcaagaaattgagagcacaaacaaatctagagagttgagaattgccgaaatcacccatctacagcaacaattacaggaatctcagcaaatgcttggaagacttattccagaaaaacagatactcaatgaccaattaaaacaagttcagcagaacagtttgcacagagattcacttgttacacttaaaagagccttagaagcaaaagaactagctcggcagcacctacgagaccaactggatgaagtggagaaagaaactagatcaaaactacaggagattgatattttcaataatcagctgaaggaactaagagaaatacacaataagcaacaactccagaagcaaaagtccatggaggctgaacgactgaaacagaaagaacaagaacgaaagatcatagaattagaaaaacaaaaagaagaagcccaaagacgagctcaggaaagggacaagcagtggctggagcatgtgcagcaggaggacgagcatcagagaccaagaaaactccacgaagaggaaaaactgaaaagggaggagagtgtcaaaaagaaggatggcgaggaaaaaggcaaacaggaagcacaagacaagctgggtcggcttttccatcaacaccaagaaccagctaagccagctgtccaggcaccctggtccactgcagaaaaaggtccacttaccatttctgcacaggaaaatgtaaaagtggtgtattaccgggcactgtacccctttgaatccagaagccatgatgaaatcactatccagccaggagacatagtcatggttaaaggggaatgggtggatgaaagccaaactggagaacccggctggcttggaggagaattaaaaggaaagacagggtggttccctgcaaactatgcagagaaaatcccagaaaatgaggttcccgctccagtgaaaccagtgactgattcaacatctgcccctgcccccaaactggccttgcgtgagacccccgcccctttggcagtaacctcttcagagccctccacgacccctaataactgggccgacttcagctccacgtggcccaccagcacgaatgagaaaccagaaacggataactgggatgcatgggcagcccagccctctctcaccgttccaagtgccggccagttaaggcagaggtccgcctttactccagccacggccactggctcctccccgtctcctgtgctaggccagggtgaaaaggtggaggggctacaagctcaagccctatatccttggagagccaaaaaagacaaccacttaaattttaacaaaaatgatgtcatcaccgtcctggaacagcaagacatgtggtggtttggagaagttcaaggtcagaagggttggttccccaagtcttacgtgaaactcatttcagggcccataaggaagtctacaagcatggattctggttcttcagagagtcctgctagtctaaagcgagtagcctctccagcagccaagccggtcgtttcgggagaagaatttattgccatgtacacttacgagagttctgagcaaggagatttaacctttcagcaaggggatgtgattttggttaccaagaaagatggtgactggtggacaggaacagtgggcgacaaggccggagtcttcccttctaactatgtgaggcttaaagattcagagggctctggaactgctgggaaaacagggagtttaggaaaaaaacctgaaattgcccaggttattgcctcatacaccgccaccggccccgagcagctcactctcgcccctggtcagctgattttgatccgaaaaaagaacccaggtggatggtgggaaggagagctgcaagcacgtgggaaaaagcgccagataggctggttcccagctaattatgtaaagcttctaaaccctgggacgagcaaaatcactccaacagagccacctaagtcaacagcattagcggcagtgtgccaggtgattgggatgtacgactacaccgcgcagaatgacgatgagctggccttcaacaagggccagatcatcaacgtcctcaacaaggaggaccctgactggtggaaaggagaagtcaatggacaagtggggctcttcccatccaattatgtgaagctgaccacagacatggacccaagccagcaatggtgttcagacttacatctcttggatatgttgaccccaactgaaagaaagcgacaaggatacatccacgagctcattgtcaccgaggagaactatgtgaatgacctgcagctggtcacagagatttttcaaaaacccctgatggagtctgagctgctgacagaaaaagaggttgctatgatttttgtgaactggaaggagctgattatgtgtaatatcaaactactaaaagcgctgagagtccgcaagaagatgtccggggagaagatgcctgtgaagatgattggagacatcctgagcgcacagctgccgcacatgcagccctacatccgcttctgcagccgccagctcaacggggctgccctgatccagcagaagacggacgaggccccagacttcaaggagttcgtcaaaagattggaaatggatcctcggtgtaaagggatgccactctctagttttatactgaagcctatgcaacgggtaacaagatacccactgatcattaaaaatatcctggaaaacacccctgaaaaccacccggaccacagccacttgaagcacgccctggagaaggcggaagagctctgttcccaggtgaacgaaggggtgcgggagaaggagaactctgaccggctggagtggatccaggcccacgtgcagtgtgaaggcctgtctgagcaacttgtgttcaattcagtgaccaattgcttggggccgcgcaaatttctgcacagtgggaagctctacaaggccaagaacaacaaggagctgtatggcttccttttcaacgacttcctcctgctgactcagatcacgaagcctttggggtcttctggcaccgacaaagtcttcagccccaaatcaaacctgcagtataaaatgtataaaacacctattttcctaaatgaggttctagtaaaattacccaccgacccttctggagacgagcccatcttccacatctcccacattgaccgcgtctatactctccgagcagaaagcataaatgaaaggactgcctgggtgcagaaaatcaaagctgcttctgaactttacatagagactgagaaaaagaagcgcgagaaagcgtacctggtccgttcccaaagggcaacaggcattggaaggttgatggtgaacgtggttgaaggcatcgagttgaaaccctgtcggtcacatggaaagagcaacccgtactgtgaggtgaccatgggttcccagtgccacatcaccaagacgatccaggacactctgaaccccaagtggaattccaactgccagttcttcatccgagacctggagcaggaagtcctctgcatcactgtgttcgagagggaccagttctcaccagatgattttttgggtcggacggagatccgtgtggcggacatcaagaaagaccagggctccaaaggtccagttacgaagtgtcttctgctgcacgaagtccccacgggagagattgtggtccgcttggacctgcagttgtttgatgagccgtaggcagcgggctcagggtgtgctcagcagggtcccagcccacggccacacatgctgtctggaaattgtattccttttctaagaaaccaccatttggtattcagtcacagggatatgggatggcaaagacaggcccctcaaagctcctaggaatcattctcgacaatcctccctgccccgaaacaatttcctgtttcatgaaacaaagctgtgttttcctttgtcctcactacaggtctcattatggcttctagggtcgctgaaatcccatagccctcaacagggtgcagctgggagtctagccccttcccgggcttgagggatgggtctggttactataaaatagatttataaatgcaatgtctatatttttggagaactcatgtaaccctcctgtttcttacatccaccagtccccaagtagacttcttggcctacaatgcccagtccttggtgtgagtttagaaacaattatgacggtcctgtcattgcttcagaatcccatctctcctgcagggaaatgctgcctagagctgatcactcggtgagacggtctgatcaggccctggcttagctctttgaagagctggtctatggaagtttccagcatgtgcaccgttatagccgttccttccccctctaggccttgtattaatatatgtcaatgaaaacacactggtgtattgttgcgtggattcagttctgattcccagcatgcttagaatatggtcacagaaagtcattatctagaaagtcacccctctgctggatcagatcactacaggtcactggaaaggcaactttacaatgttgggtcactgggtctcggttggcagccatgttggaaaaatctcttttggctcggaggcctgtgatatttcatagcagcagtcgttgctggtgacctgttctgtgcttgaatgtgctgaatcctgattgttgtaggacatttcaacagctctttttggtacgttccccaaaaagccatgtcctagatccccaaggcgtgaaaaggaaaaatatcaagctggaggttgggaaagaaaatgaaggcagtccattatgtggtgggtgaaagaccctaggaggatgcaagccccgcacatcccggggcaaagacctaagacacttttccaccctccaccaccccaacctcacataatatgcttgttgcaagagtcaggactttatgactatgtgccaagctgtttggtttgagttctttaatttttttttcccttaaatgccaggagatcatctggttagttagatagtaacttgatttgctaatgaaaagtgggggccgtgttttgtttgcatgttaatattctcataatcctagtttgttgtggtcatgaaatgccctttgcatgttctgttggtactggagtctagctttcctgtactagatggtgttctctttgattgtaggtccttagactttaattagggttatcaaagtgctttctaaatgatagcatcagcgttgtggcagagtacctcctttgctgggaactgaatgtgtagggttatcatttcccatgagagcccggtcatacttcaagcaatttttttaaaagtgtgtgttggaaaggacaacaaagtttacatttcatacttttaagaaatactttattatttatttattgaagatagtgtagaattttgtatcaagaacaacagacataagtattttttgaaacaagcaaatataccctgtagttagaaactttcaactgaacatgttagagaccaagtttaacttcaggcatgcatttgtttaccatttcccagcagaaaacatggttaaaatactttaagtttatattttttgatgttgttaagaaacttttaaattaaatctataaatagacatgcaactcatgctttcctatttctataaccaacaccgtttgtttagtgtatttatgaaagatatgctaccatggtagaaagaaaagtattcaatgtgtaaatt

SEQ ID NO: 58 - DNA, 3001 bp, Homo sapiens
actttcctgccccttccccggccaagcccaactccggatctcgctctccaccggatctcacccgccacacccggacaggcggctggaggaggcgggcgtctaaaattctgggaagcagaacctggccggagccactagacagagccgggcctagcccagagacatggagagttgctacaacccaggtctggatggtattattgaatatgatgatttcaaattgaactcctccattgtggaacccaaggagccagccccagaaacagctgatggcccctacctggtgatcgtggaacagcctaagcagagaggcttccgatttcgatatggctgtgaaggcccctcccatggaggactgcccggtgcctccagtgagaagggccgaaagacctatcccactgtcaagatctgtaactacgagggaccagccaagatcgaggtggacctggtaacacacagtgacccacctcgtgctcatgcccacagtctggtgggcaagcaatgctcggagctggggatctgcgccgtttctgtggggcccaaggacatgactgcccaatttaacaacctgggtgtcctgcatgtgactaagaagaacatgatggggactatgatacaaaaacttcagaggcagcggctccgctctaggccccagggccttacggaggccgagcagcgggagctggagcaagaggccaaagaactgaagaaggtgatggatctgagtatagtgcggctgcgcttctctgccttccttagagccagtgatggctccttctccctgcccctgaagccagtcacctcccagcccatccatgatagcaaatctccgggggcatcaaacctgaagatttctcgaatggacaagacagcaggctctgtgcggggtggagatgaagtttatctgctttgtgacaaggtgcagaaagatgacattgaggttcggttctatgaggatgatgagaatggatggcaggcctttggggacttctctcccacagatgtgcataaacagtatgccattgtgttccggacacccccctatcacaagatgaagattgagcggcctgtaacagtgtttctgcaactgaaacgcaagcgaggaggggacgtgtctgattccaaacagttcacctattaccctctggtggaagacaaggaagaggtgcagcggaagcggaggaaggccttgcccaccttctcccagcccttcgggggtggctcccacatgggtggaggctctgggggtgcagccgggggctacggaggagctggaggaggtggcagcctcggtttcttcccctcctccctggcctacagcccctaccagtccggcgcgggccccatgcggtgctacccgggaggcgggggcggggcgcagatggccgccacggtgcccagcagggactccggggaggaagccgcggagccgagcgccccctccaggaccccccagtgcgagccgcaggccccggagatgctgcagcgagctcgagagtacaacgcgcgcctgttcggcctggcgcacgcagccccgagccctactcgactactgcgtcaccgcggacgccgcgcgctgctggcgggacagcgccacctgctgacggcgcaggacgagaacggagacacaccactgcacctagccatcatccacgggcagaccagtgtcattgagcagatagtctatgtcatccaccacgcccaggacctcggcgttgtcaacctcaccaaccacctgcaccagacgcccctgcacctggcggtgatcacggggcagacgagtgtggtgagctttctgctgcgggtaggtgcagacccagctctgctggatcggcatggagactcagccatgcatctggcgctgcgggcaggcgctggtgctcctgagctgctgcgtgcactgcttcagagtggagctcctgctgtgccccagctgttgcatatgcctgactttgagggactgtatccagtacacctggcggtccgagcccgaagccctgagtgcctggatctgctggtggacagtggggctgaagtggaggccacagagcggcaggggggacgaacagccttgcatctagccacagagatggaggagctggggttggtcacccatctggtcaccaagctccgggccaacgtgaacgctcgcacctttgcgggaaacacacccctgcacctggcagctggactggggtacccgaccctcacccgcctccttctgaaggctggtgctgacatccatgctgaaaacgaggagcccctgtgcccactgccttcaccccctacctctgatagcgactcggactctgaagggcctgagaaggacacccgaagcagcttccggggccacacgcctcttgacctcacttgcagcaccttggtgaagaccttgctgctaaatgctgctcagaacaccatggagccacccctgaccccgcccagcccagcagggccgggactgtcacttggtgatacagctctgcagaacctggagcagctgctagacgggccagaagcccagggcagctgggcagagctggcagagcgtctggggctgcgcagcctggtagacacgtaccgacagacaacctcacccagtggcagcctcctgcgcagctacgagctggctggcggggacctggcaggtctactggaggccctgtctgacatgggcctagaggagggagtgaggctgctgaggggtccagaaacccgagacaagctgcccagcacagaggtgaaggaagacagtgcgtacgggagccagtcagtggagcaggaggcagagaagctgggcccaccccctgagccaccaggagggctctcgcacgggcacccccagcctcaggtgactgacctgctgcctgcccccagcccccttcccggaccccctgtacagcgtccccacctatttcaaatcttatttaacaccccacacccacccctcagttgggacaaataaaggattctcatgggaaggggaggaccccgaattcct

SEQ ID NO: 59 - DNA, 597 bp, Homo sapiens
atgcccctaggtctcctgtggctgggcctagccctgttgggggctctgcatgcccaggcccaggactccacctcagacctgatcccagccccacctctgagcaaggtccctctgcagcagaacttccaggacaaccaattccaggggaagtggtatgtggtaggcctggcagggaatgcaattctcagagaagacaaagacccgcaaaagatgtatgccaccatctatgagctgaaagaagacaagagctacaatgtcacctccgtcctgtttaggaaaaagaagtgtgactactggatcaggacttttgttccaggttgccagcccggcgagttcacgctgggcaacattaagagttaccctggattaacgagttacctcgtccgagtggtgagcaccaactacaaccagcatgctatggtgttcttcaagaaagtttctcaaaacagggagtacttcaagatcaccctctacgggagaaccaaggagctgacttcggaactaaaggagaacttcatccgcttctccaaatatctgggcctccctgaaaaccacatcgtcttccctgtcccaatcgaccagtgtatcgacggctga

SEQ ID NO: 60 - DNA, 2589 bp, Homo sapiens
caaccagggagatttctccattttcctcttgtctacagtgcggctacaaatctgggatttttttattacttctttttttttcgaactacacttgggctcctttttttgtgctcgacttttccaccctttttccctccctcctgtgctgctgctttttgatctcttcgactaaaatttttttatccggagtgtatttaatcggttctgttctgtcctctccaccacccccacccccctccctccggtgtgtgtgccgctgccgctgttgccgccgccgctgctgctgctgctcgccccgtcgttacaccaacccgaggctctttgtttcccctcttggatctgttgagtttctttgttgaagaagccagcatgggtgcccagttctccaagaccgcagcgaagggagaagccgccgcggagaggcctggggaggcggctgtggcctcgtcgccttccaaagcgaacggacaggagaatggccacgtgaaggtaaacggcgacgcttcgcccgcggccgccgagtcgggcgccaaggaggagctgcaggccaacggcagcgccccggccgccgacaaggaggagcccgcggccgccgggagcggggcggcgtcgccctcctcggccgagaaaggtgagccggccgccgccgctgcccccgaggccggggccagcccggtagagaaggaggcccccgcggaaggcgaggctgccgagcccggctcggccacggccgcggagggagaggccgcgtcggccgcctcctcgacttcttcgcccaaggccgaggacggggccacgccctcgcccagcaacgagaccccgaaaaaaaaaaagaagcgcttttccttcaagaagtctttcaagctgagcggcttctccttcaagaagaacaagaaggaggctggagaaggcggtgaggctgaggcgcccgctgccgaaggcggcaaggacgaggccgccgggggcgcagctgcggccgccgccgaggcgggcgcggcctccggggagcaggcagcggcgccgggcgaggaggcggcagcgggcgaggagggggcggcgggtggcgacccgcaggaggccaagccccaggaggccgctgtcgcgccagagaagccgcccgccagcgacgagaccaaggccgccgaggagcccagcaaggtggaggagaaaaaggccgaggaggccggggccagcgccgccgcctgcgaggccccctccgccgccgggcccggcgcgcccccggagcaggaggcagcccccgcggaggagcccgcggccgccgcagcctcgtcagcctgcgcagccccctcacaggaggcccagcccgagtgcagtccagaagcccccccagcggaggcggcagagtaaaagagcaagcttttgtgagataatcgaagaacttttctcccccgtttgtttgttggagtggtgccaggtactgttttggagaacttgtctacaaccagggattgattttaaagatgtctttttttattttacttttttttaagcaccaaattttgttgtttttttttttctcccctccccacagatcccatctcaaatcattctgttaaccaccattccaacaggtcgaggagagcttaaacaccttcttcctctgccttgtttctcttttattttttattttttcgcatcagtattaatgtttttgcatactttgcatctttattcaaaagtgtaaactttctttgtcaatctatggacatgcccatatatgaaggagatgggtgggtcaaaaagggatatcaaatgaagtgataggggtcacaatggggaaattgaagtggtgcataacattgccaaaatagtgtgccactagaaatggtgtaaaggctgtctttttttttttttttaaagaaaagttattaccatgtattttgtgaggcaggtttacaacactacaagtcttgagttaagaaggaaagaggaaaaaagaaaaaacaccaatacccagatttaaaaaaaaaaaaacgatcatagtcttaggagttcatttaaaccataggaacttttcacttatctcatgttagctgtaccagtcagtgattaagtagaactacaagttgtataggctttattgtttattgctggtttatgaccttaataaagtgtaattatgtattaccagcagggtgtttttaactgtgactattgtataaaaacaaatcttgatatccagaagcacatgaagtttgcaactttccaccctgcccatttttgtaaaactgcagtcatcttggaccttttaaaacacaaattttaaactcaaccaagctgtgataagtggaatggttactgtttatactgtggtatgtttttgattacagcagataatgctttcttttccagtcgtctttgagaataaaggaaaaaaaatcttcagatgcaatggttttgtgtagcatcttgtctatcatgttttgtaaatactggagaagctttgaccaatttgacttagagatggaatgtaactttgcttacaaaaattgctattaaactcctgcttaaggtgttctaattttctgtgagcacactaaaagcgaaaaataaatgtgaataaaatgt

SEQ ID NO: 61 - DNA, 1229 bp, Homo sapiens
acggttgtaagccagacaaaaagaactggggtgcccggagtgccaggtggcgggcaagcggtgggcttttcggcggggtctttaggatttgcagctccaggaagcgagatgtcgaagccgccacccaaaccagtcaaaccaggtgagggagggcaagttaaagtcttcagagccctgtatacgtttgaacccagaactccagatgaattatactttgaggaaggtgatattatctacattactgacatgagcgataccaattggtggaaaggcacctccaaaggcaggactggactaattccaagcaactatgtggctgagcaggcagaatccattgacaatccattgcatgaagcagcaaaaagaggcaacttgagctggttgagagagtgtttggacaacagagtgggtgttaatggcttagacaaagctggaagcactgccttatactgggcttgccacgggggccacaaagatatagtggaaatgctatttactcaaccaaatattgaactgaaccagcagaacaagttgggagatacagctttgcatgctgctgcctggaagggttatgcagatatcgtccagttgtttctggcaaaaggtgctagaacagacttaagaaacattgagaagaagctggccttcgacatggctaccaatgctgcctgtgcatctctcctgaaaaagaaacagggaacagatgcagttcgaacattaagcaatgccgaggactatctcgatgatgaagactcagattaattcctttctggagctttgagatctaaaacttctgttgcttttgccattccaaaactttgtctttgccagaaaagtgttggtaactataaagaaaattatatatgaacacggcagtgttgcactgtgtttgagtagaacgtgtaaatgaattgttcccacctttggtttgccagtaagtgactggattcttggcacatttgtgttcaccaaagtagaacaagaagatattatttctatttatcaagcaaaaggaattttaagatttttttttctttaaaaacaaattaggattttttttttttttttttttttttagttaaaatgctttacctcaatggttgagatattttgaatggatttttcaagggggggaaatgcttattataataataaaccaaaatacttaacagaaaattgtcagctattctgacaaaaacaaaaaaaaaaaaaaaaaaaaaaaaaaaaaa

SEQ ID NO: 62 - DNA, 2477 bp, Homo sapiens
aggggaagggaatgtgaccaggtctaggtctggagtttcagcttggacactgagccaagcagacaagcaaagcaagccaggacacaccatcctgccccaggcccagcttctctcctgccttccaacgccatggggagcaatctcagcccccaactctgcctgatgccctttatcttgggcctcttgtctggaggtgtgaccaccactccatggtctttggcccagccccagggatcctgctctctggagggggtagagatcaaaggcggctccttccgacttctccaagagggccaggcactggagtacgtgtgtccttctggcttctacccgtaccctgtgcagacacgtacctgcagatctacggggtcctggagcaccctgaagactcaagaccaaaagactgtcaggaaggcagagtgcagagcaatccactgtccaagaccacacgacttcgagaacggggaatactggccccggtctccctactacaatgtgagtgatgagatctctttccactgctatgacggttacactctccggggctctgccaatcgcacctgccaagtgaatggccggtggagtgggcagacagcgatctgtgacaacggagcggggtactgctccaacccgggcatccccattggcacaaggaaggtgggcagccagtaccgccttgaagacagcgtcacctaccactgcagccgggggcttaccctgcgtggctcccagcggcgaacgtgtcaggaaggtggctcttggagcgggacggagccttcctgccaagactccttcatgtacgacacccctcaagaggtggccgaagctttcctgtcttccctgacagagaccatagaaggagtcgatgctgaggatgggcacggcccaggggaacaacagaagcggaagatcgtcctggacccttcaggctccatgaacatctacctggtgctagatggatcagacagcattggggccagcaacttcacaggagccaaaaagtgtctagtcaacttaattgagaaggtggcaagttatggtgtgaagccaagatatggtctagtgacatatgccacataccccaaaatttgggtcaaagtgtctgaagcagacagcagtaatgcagactgggtcacgaagcagctcaatgaaatcaattatgaagaccacaagttgaagtcagggactaacaccaagaaggccctccaggcagtgtacagcatgatgagctggccagatgacgtccctcctgaaggctggaaccgcacccgccatgtcatcatcctcatgactgatggattgcacaacatgggcggggacccaattactgtcattgatgagatccgggacttgctatacattggcaaggatcgcaaaaacccaagggaggattatctggatgtctatgtgtttggggtcgggcctttggtgaaccaagtgaacatcaatgctttggcttccaagaaagacaatgagcaacatgtgttcaaagtcaaggatatggaaaacctggaagatgttttctaccaaatgatcgatgaaagccagtctctgagtctctgtggcatggtttgggaacacaggaagggtaccgattaccacaagcaaccatggcaggccaagatctcagtcattcgcccttcaaagggacacgagagctgtatgggggctgtggtgtctgagtactttgtgctgacagcagcacattgtttcactgtggatgacaaggaacactcaatcaaggtcagcgtaggaggggagaagcgggacctggagatagaagtagtcctatttcaccccaactacaacattaatgggaaaaaagaagcaggaattcctgaattttatgactatgacgttgccctgatcaagctcaagaataagctgaaatatggccagactatcaggcccatttgtctcccctgcaccgagggaacaactcgagctttgaggcttcctccaactaccacttgccagcaacaaaaggaagagctgctccctgcacaggatatcaaagctctgtttgtgtctgaggaggagaaaaagctgactcggaaggaggtctacatcaagaatggggataagaaaggcagctgtgagagagatgctcaatatgccccaggctatgacaaagtcaaggacatctcagaggtggtcacccctcggttcctttgtactggaggagtgagtccctatgctgaccccaatacttgcagaggtgattctggcggccccttgatagttcacaagagaagtcgtttcattcaagttggtgtaatcagctggggagtagtggatgtctgcaaaaaccagaagcggcaaaagcaggtacctgctcacgcccgagactttcacatcaacctctttcaagtgctgccctggctgaaggagaaactccaagatgaggatttgggttttctataaggggtttcctgctggacaggggcgtgggattgaattaaaacagctgcgacaac

SEQ ID NO: 63 - DNA, 2038 bp, Homo sapiens
gcaggcccgttggaagtggttgtgacaaccccagcaatgtggagaagcctggggcttgccctggctctctgtctcctcccatcgggaggaacagagagccaggaccaaagctccttatgtaagcaacccccagcctggagcataagagatcaagatccaatgctaaactccaatggttcagtgactgtggttgctcttcttcaagccagctgatacctgtgcatcatcgaggcatctaaattagaagacctgcgagtaaaactgaagaaagaaggatattctaatatttcttatattgttgttaatcatcaaggaatctcttctcgattaaaatacacacatcttaagaataaggtttcagagcatattcctgtttatcaacaagaagaaaaccaaacagatgtctggactcttttaaatggaagcaaagatgacttcctcatatatgatagatgtggccgtcttgtatatcatcttggtttgcctttttccttcctaactttcccatatgtagaagaagccattaagattgcttactgtgaaaagaaatgtggaaactgctctctcacgactctcaaagatgaagacttttgtaaacgtgtatctttggctactgtggataaaacagttgaaactccatcgcctcattaccatcatgagcatcatcacaatcatggacatcagcaccttggcagcagtgagctttcagagaatcagcaaccaggagcaccaaatgctcctactcatcctgctcctccaggccttcatcaccaccataagcacaagggtcagcataggcagggtcacccagagaaccgagatatgccagcaagtgaagatttacaagatttacaaaagaagctctgtcgaaagagatgtataaatcaattactctgtaaattgcccacagattcagagttggctcctaggagctgatgctgccattgtcgacatctgatatttgaaaaaacagggtctgcaatcacctgacagtgtaaagaaaacctcccatctttatgtagctgacagggacttcgggcagaggagaacataactgaatcttgtcagtgacgtttgcctccagctgcctgacaaataagtcagcagcttatacccacagaagccagtgccagttgacgctgaaagaatcaggcaaaaaagtgagaatgaccttcaaactaaatatttaaaataggacatactccccaatttagtctagacacaatttcatttccagcatttttataaactaccaaattagtgaaccaaaaatagaaattagatttgtgcaaacatggagaaatctactgaattggcttccagattttaaattttatgtcatagaaatattgactcaaaccatattttttatgatggagcaactgaaaggtgattgcagcttttggttaatatgtctttttttttctttttccagtgttctatttgctttaatgagaatagaaacgtaaactatgacctaggggttttctgttggataattagcagtttagaatggaggaagaacaacaaagacatgctttccattttttcctttacttatctctcaaaacaatattactttgtcttttcaatcttctacttttaactaataaaataagtggattttgtattttaagatccagaaatacttaacacgtgaatattttgctaaaaaagcatatataactattttaaatatccatttatcttttgtatatctaagactcatcctgatttttactatcacacatgaataaaggcctttgtatctttctttctctaatgttgtatcatactcttctaaaacttgagtggctgtcttaaaagatataaggggaaagataatattgtctgtctctatattgcttagtaagtatttccatagtcaatgatggtttaataggtaaaccaaaccctataaacctgacctcctttatggttaatactattaagcaagaatgcagtacagaattggatacagtacggatttgtccaaataaattcaataaaaaccttaaaaaaaaaaaaaaaaaaaaaa

SEQ ID NO: 64 - DNA, 2772 bp, Homo sapiens
atggagagggggctgccgctcctctgcgccgtgctcgccctcgtcctcgccccggccggcgcttttcgcaacgatgaatgtggcgatactataaaaattgaaagccccgggtaccttacatctcctggttatcctcattcttatcacccaagtgaaaaatgcgaatggctgattcaggctccggacccataccagagaattatgatcaacttcaaccctcacttcgatttggaggacagagactgcaagtatgactacgtggaagtcttcgatggagaaaatgaaaatggacattttaggggaaagttctgtggaaagatagcccctcctcctgttgtgtcttcagggccatttctttttatcaaatttgtctctgactacgaaacacatggtgcaggattttccatacgttatgaaattttcaagagaggtcctgaatgttcccagaactacacaacacctagtggagtgataaagtcccccggattccctgaaaaatatcccaacagccttgaatgcacttatattgtctttgcgccaaagatgtcagagattatcctggaatttgaaagctttgacctggagcctgactcaaatcctccaggggggatgttctgtcgctacgaccggctagaaatctgggatggattccctgatgttggccctcacattgggcgttactgtggacagaaaacaccaggtcgaatccgatcctcatcgggcattctctccatggttttttacaccgacagcgcgatagcaaaagaaggtttctcagcaaactacagtgtcttgcagagcagtgtctcagaagatttcaaatgtatggaagctctgggcatggaatcaggagaaattcattctgaccagatcacagcttcttcccagtatagcaccaactggtctgcagagcgctcccgcctgaactaccctgagaatgggtggactcccggagaggattcctaccgagagtggatacaggtagacttgggccttctgcgctttgtcacggctgtcgggacacagggcgccatttcaaaagaaaccaagaagaaatattatgtcaagacttacaagatcgacgttagctccaacggggaagactggatcaccataaaagaaggaaacaaacctgttctctttcagggaaacaccaaccccacagatgttgtggttgcagtattccccaaaccactgataactcgatttgtccgaatcaagcctgcaacttgggaaactggcatatctatgagatttgaagtatacggttgcaagataacagattatccttgctctggaatgttgggtatggtgtctggacttatttctgactcccagatcacatcatccaaccaaggagacagaaactggatgcctgaaaacatccgcctggtaaccagtcgctctggctgggcacttccacccgcacctcattcctacatcaatgagtggctccaaatagacctgggggaggagaagatcgtgaggggcatcatcattcagggtgggaagcaccgagagaacaaggtgttcatgaggaagttcaagatcgggtacagcaacaacggctcggactggaagatgatcatggatgacagcaaacgcaaggcgaagtcttttgagggcaacaacaactatgatacacctgagctgcggacttttccagctctctccacgcgattcatcaggatctaccccgagagagccactcatggcggactggggctcagaatggagctgctgggctgtgaagtggaagcccctacagctggaccgaccactcccaacgggaacttggtggatgaatgtgatgacgaccaggccaactgccacagtggaacaggtgatgacttccagctcacaggtggcaccactgtgctggccacagaaaagcccacggtcatagacagcaccatacaatcagagtttccaacatatggttttaactgtgaatttggctggggctctcacaagaccttctgccactgggaacatgacaatcacgtgcagctcaagtggagtgtgttgaccagcaagacgggacccattcaggatcacacaggagatggcaacttcatctattcccaagctgacgaaaatcagaagggcaaagtggctcgcctggtgagccctgtggtttattcccagaactctgcccactgcatgaccttctggtatcacatgtctgggtcccacgtcggcacactcagggtcaaactgcgctaccagaagccagaggagtacgatcagctggtctggatggccattggacaccaaggtgaccactggaaggaagggcgtgtcttgctccacaagtctctgaaactttatcaggtgattttcgagggcgaaatcggaaaaggaaaccttggtgggattgctgtggatgacattagtattaataaccacatttcacaagaagattgtgcaaaaccagcagacctggataaaaagaacccagaaattaaaattgatgaaacagggagcacgccaggatacgaaggtgaaggagaaggtgacaagaacatctccaggaagccaggcaatgtgttgaagaccttagaacccatcctcatcaccatcatagccatgagcgccctgggggtcctcctgggggctgtctgtggggtcgtgctgtactgtgcctgttggcataatgggatgtcagaaagaaacttgtctgccctggagaactataactttgaacttgtggatggtgtgaagttgaaaaaagacaaactgaatacacagagtacttattcggaggcatga

SEQ ID NO: 65 - protein, 165 aa, Homo sapiens
MVNPTVFFDIAVDGEPLGRVSFELFADKVPKTAENFRALSTGEKGFGYKGSCFHRIIPGFMCQGGDFTRHNGTGGKSIYGEKFEDENFILKHTGPGILSMANAGPNTNGSQFFICTAKTEWLDGKHVVFGKVKEGMNIVEAMERFGSRNGKTSKKITIADCGQLE

SEQ ID NO: 66 - protein, 406 aa, Homo sapiens
MATPGNLGSSVLASKTKTKKKHFVAQKVKLFRASDPLLSVLMWGVNHSINELSHVQIPVMLMPDDFKAYSKIKVDNHLFNKENMPSHFKFKEYCPMVFRNLRERFGIDDQDFQNSLTRSAPLPNDSQARSGARFHTSYDKRYIIKTITSEDVAEMHNILKKYHQYIVECHGITLLPQFLGMYRLNVDGVEIYVIVTRNVFSHRLSVYRKYDLKGSTVAREASDKEKAKELPTLKDNDFINEGQKIYIDDNNKKVFLEKLKKDVEFLAQLKLMDYSLLVGIHDVERAEQEEVECEENDGEEEGESDGTHPVGTPPDSPGNTLNSSPPLAPGEFDPNIDVYGIKCHENSPRKEVYFMAIIDILTHYDAKKKAAHAAKTVKHGAGAEISTVNPEQYSKRFLDFIGHILT

SEQ ID NO: 67 - DNA, 2385 bp, Homo sapiens
atggccgacttcgatgatcgtgtgtcggatgaggagaaggtacgcatagctgctaaattcatcactcatgcacccccaggggaatttaatgaagtattcaatgacgttcggctactacttaataatgacaatctcctcagggaaggggcagcacatgcatttgcccagtataacatggatcagttcacgcctgtgaagatagaaggatatgaagatcaggtcttaattacagagcacggtgacctgggtaatagcagatttttagatccaagaaacaaaatttcctttaaatttgaccacttacggaaagaagcaagtgacccccagccagaagaagcagatggaggtctgaagtcttggagagaatcctgtgacagtgctttaagagcctatgtgaaagaccattattccaacggcttctgtactgtttatgctaaaactatcgatgggcaacagactattattgcatgtattgaaagccaccagtttcagcctaaaaacttctggaatggtcgttggagatcagagtggaagttcaccatcacaccacctacagcccaggtggttggcgtgcttaagattcaggttcactattatgaagatggcaatgttcagttggttagtcataaagatgtacaggattcactaactgtttcgaatgaagcccaaactgccaaggagtttattaaaatcatagagaatgcagaaaatgagtatcagacagcaattagtgaaaactatcaaacaatgtcagataccacattcaaggccttgcgccgccagcttccagttacccgcaccaaaatcgactggaacaagatactcagctacaagattggcaaagaaatgcagaatgcttaaaggctgaatgtaggattcttcagtatgtggaaagacaaggattcaacgtgtggtcatatgataaataagtgatttataaacaagagtgatattttgctagggctttcaaagttaaccggttttctagcctcatggaatactgttgaacctatagcgttgtcttgattcttttgtgttctctgccttgtaattttctgttactgctatatctacgtgtaaatctttttttctttttttttttttttttttttcttttttggttaattctgccacatttaatgttggtgagagagtgatctatcctaatgacatttactgtttaaaaaagtttcctagccatgaagccctgctactgatttagacaaggtattatggtcattactttgtacccctatccttccaagcacttctggtacttcagtcgtttttactgatccaccaacacctaaagaggctatgctacagtctctagctaaatggaagacacattcatccttctccctctgactgctttgatcatcatttattgcatcgtcatatcatatttatcgcatctcataactaactttctaaagtttggattgggacttttcaggtcctttttggagggcaaaggaagttccagcttctctggggaacttgtttttaaatccaaagacttgaaccacattccctgcacatgaacatgtttgcttttatcccttctctcattggctccttcccatcttagtaccattgtagttatacatctgcattttttagaagcattttacccatttatttttttaaacattcaagaactgctgacgtactgtggatgtagagtataaaacttgaaaaatgcagatgttgaaggaataataggtatcttgtgctttaatactttatggcaggattgtactataagcaaatgaattaaacagctatgtaaatcataaagaaaaactaaaaatgaaccaaagtgaaaggataacttccaggcagtatctttctattgtaacctgttatttaaggaaatactagtgatttcttctaaataggatgtaaacttctttcaaattactcttcctcagtctgcctgccaagaactcaagtgtaactgtgataaaataacctttcccaggtatattcggcaggtatgtgtgtaatctcagaatacacaggtgacatagatatgatatgacaactggtaatggtggattcatttacattgtttacacttctatgaccaggccttaagggaaggtcagttttttaaaaaaccaagtagtgtcttcctacctatctccagatacatgtcaaaaagaaaaggtgtttgtgctccgttttgtttctgctcagtaatatagtcaagcaagtttgttccaggtgacccattgagctgtgtatgcatttttgtttatttcaataaaatatatttgtattatttgtccttcatactatccatccataccacactatcttctgtatcaggtagtctaatagaaatatacctgttttgttctaaaaaaaaaaaaaaaaaaa

SEQ ID NO: 68 - protein, 381 aa, Homo sapiens
MHLLAILFCALWSAVLAENSDDYDLMYVNLDNEIDNGLHPTEDPTPCDCGQEHSEWDKLFIMLENSQMRERMLLQATDDVLRGELQRLREELGRLAESLARPCAPGAPAEARLTSALDELLQATRDAGRRLARMEGAEAQRPEEAGRALAAVLEELRQTRADLHAVQGWAARSWLPAGCETAILFPMRSKKIFGSVHPVRPMRLESFSACIWVKATDVLNKTILFSYGTKRNPYEIQLYLSYQSIVFVVGGEENKLVAEAMVSLGRWTHLCGTWNSEEGLTSLWVNGELAATTVEMATGHIVPEGGILQIGQEKNGCCVGGGFDETLAFSGRLTGFNIWDSVLSNEEIRETGGAESCHIRGNIVGWGVTEIQPHGGAQYVS

SEQ ID NO: 69 - protein, 188 aa, Homo sapiens
MNWHMIISGLIVVVLKVVGMTLFLLYFPQIFNKSNDGFTTTRSYGTVSQIFGSSSPSPNGFITTRSYGTVCPKDWEFYQARCFFLSTSESSWNESRDFCKGKGSTLAIVNTPEKLKFLQDITDAEKYFIGLIYHREEKRWRWINNSVFNGNVTNQNQNFNCATIGLTKTFDAASCDISYRRICEKNAK

SEQ ID NO: 70 - DNA, 2369 bp, Homo sapiens
attgatcgctttctgcaaccattcagactgatctcgggctcctatttcatttacattgtgtgcacaccaagtaaccagtgggaaaactttagagggtacttaaaccccagaaaattctgaaaccgggctcttgagccgctatcctcgggcctgctcccaccctgtggagtgcactttcgttttcaataaatctctgcttttgttgcttcattctttccttgctttgtttgtgtgtttgtccagttctttgttcaacacgccaagaacctggacactcttcactggtaacatattttggcaagccaaccaggagaaaagaatttctgcttggacactgcatagctgctgggaaaatgaacatcagtgttgatttggaaacgaattatgccgagttggttctagatgtgggaagagtcactcttggagagaacagtaggaaaaaaatgaaggattgtaaactgagaaaaaagcagaatgaaagtgtctcacgagctatgtgtgctctgctcaattctggagggggagtgatcaaggctgaaattgagaatgaagactatagttatacaaaagatggaataggactagatttggaaaattcttttagtaacattctgttatttgttcctgagtacttagacttcatgcagaatggtaactactttctgatttttgtgaagtcatggagcttgaacacctctggtctgcggattaccaccttgagctccaatttgtacaaaagagatataacatctgcaaaagtcatgaatgccactgctgcactggagttcctcaaagacatgaaaaagactagagggagattgtatttaagaccagaattgctggcaaagaggccctgtgttgatatacaagaagaaaataacatgaaggccttggccggggttttttttgatagaacagaacttgatcggaaagaaaaattgacctttactgaatccacacatgttgaaattaaaaacttctcgacagaaaagttgttacaacgaattaaagagattctccctcaatatgtttctgcatttgcaaatactgatggaggatatttgttcattggtttaaatgaagataaagaaataattggctttaaagcagagatgagtgacctcgatgacttagaaagagaaatcgaaaagtccattaggaagatgcctgtgcatcacttctgtatggagaagaagaagataaattattcatgcaaattccttggggtatatgataaaggaagtctttgtggatatgtctgtgcactcagagtggagcgcttctgctgtgcagtgtttgctaaagagcctgattcctggcatgtgaaagataaccgtgtgatgcagttgaccaggaaggaatggatccagttcatggtggaggctgaaccaaaattttccagttcatatgaagaggtgatctctcaaataaatgcgtcattacctgctccccacagttggcctcttttggaatggcaacggcagagacatcactgtccagggctatcaggaaggataacgtatactccagaaaacctttgcagaaaactgttcttacaacatgaaggacttaagcaattaatatgtgaagaaatggactctgtcagaaagggctcactgatcttctctaggagctggtctgtggatctgggcttgcaagagaaccacaaagtcctctgtgatgctcttctgatttcccaggacagtcctccagtcctatacaccttccacatggtacaggatgaggagtttaaaggctattctacacaaactgccctaaccttaaagcagaagctggcaaaaattggtggttacactaaaaaagtgtgtgtcatgacaaagatcttctacttgagccctgaaggcatgacaagctgccagtatgatttaaggtcgcaagtaatttaccctgaatcctactattttacaagaaggaaatacttgctgaaagccctttttaaagccttaaagagactcaagtctctgagagaccagttttcctttgcagaaaatctataccagataatcggtatagattgctttcagaagaatgataaaaagatgtttaaatcttgtcgaaggctcacctgatggaaaatggactgggctactgagatatttttcattatatatttgataacattctctaattctgtgaaaatatttctttgaaaactttgcaagttaagcaacttgatgtgatgttggataattgggttttgtctattttcacttctccctaaataatcttcacagatattgtttgagggatattaggaaaattaatttgttaactcgtctgtgcacagtattatttactctgtctgtagttcctgaataaattttcttccatgcttgaaaaaaaaaaat

SEQ ID NO: 71 - DNA, 1411 bp, Homo sapiens
cgggaaacggcaaacagcgagatatccgagcgagagtcccgccctgcatcagtttgcggaaccgccttggtagaaggagagaaggggagtggaggaagcacgggactggagggaccaaagttccccgatggcggcccaggggtgcgcggcatcgcggctgctccagctgctgctgcagcttctgcttctactgttgctgctggcggcgggcggggcgcgcgcgcggtggcgcgcggagggcaccagcgcacacttgcgggacatcttcctgggccgctgcgccgagtaccgcgcactgctgagtcccgagcagcggaacaagaactgcacagccatctgggaagcctttaaagtggcgctggacaaggatccctgctccgtgctgccctcagactatgacctttttattaacttgtccaggcactctattcccagagataagtccctgttctgggaaaatagccacctccttgttaacagctttgcagacaacacccgtcgttttatgcccctgagcgatgttctgtatggcagggttgcagatttcttgagctggtgtcgacagaaaaatgactctggactcgattaccaatcctgccctacatcagaagactgtgaaaataatcctgtggattccttttggaaaagggcatccatccagtattccaaggatagttctggggtgatccacgtcatgctgaatggttcagagccaacaggagcctatcccatcaaaggtttttttgcagattatgaaattccaaacctccagaaggaaaaaattacacgaatcgagatctgggttatgcatgaaattgggggacccaatgtggaatcctgcggggaaggcagcatgaaagtcctggaaaagaggctgaaggacatggggttccagtacagctgtattaatgattaccgaccagtgaagctcttacagtgcgtggaccacagcacccatcctgactgtgccttaaagtcggcagcagccgctactcaaagaaaagccccaagtctttatacagaacaaagggcgggtcttatcattcccctctttctggtgctggcttcccggactcaactgtaactggaaactgtgttgctctaaccctcctccagccctgcagcctccccttgcagtcatcattcgtgttctgtgtataccaaatgattctgttatctaaagaagctttttgctgggaaaacgatgtcctgaaaatggtatttcaatgaggcatatgttcaggatttcagaaacaagaagttagttctatttagcaggttaaaaaatgctgcattagaattaaagcaagttattttcttatttgtataatgacacaaagcattgggagtcagactgcttgtatattatcaaacattttaagagaattctaataaagctgtattttacatc

SEQ ID NO: 72 - protein, 411 aa, Homo sapiens
MKAARFVLRSAGSLNGAGLVPREVEHFSRYSPSPLSMKQLLDFGSENACERTSFAFLRQELPVRLANILKEIDILPTQLVNTSSVQLVKSWYIQSLMDLVEFHEKSPDDQKALSDFVDTLIKVRNRHHNVVPTMAQGIIEYKDACTVDPVTNQNLQYFLDRFYMNRISTRMLMNQHILIFSDSQTGNPSHIGSIDPNCDVVAVVQDAFECSRMLCDQYYLSSPELKLTQVNGKFPDQPIHIVYVPSHLHHMLFELFKNAMRATVEHQENQPSLTPIEVIVVLGKEDLTIKISDRGGGVPLRIIDRLFSYTYSTAPTPVMDNSRNAPLAGFGYGLPISRLYAKYFQGDLNLYSLSGYGTDAIIYLKALSSESIEKLPVFNKSAFKHYQMSSEADDWCIPSREPKNLAKEVAM

SEQ ID NO: 73 - DNA, 3299 bp, Homo sapiens
cggagggagcgctgggagcgagcaagcgagcgtttggagcccgggccagcagagggggcgcccggtcgctgcctgtaccgctcccgctggtcatctccgccgcgctcgggggccccgggaggagcgagaccgagtcggagagtccgggagccaagccgggcgaaacccaactgcggaggacgcccgccccactcagcctcctcctgcgtccgagccggggagcatcgccgagcgccccacgggccggagagctgggagcacaggtcccggcagccccagggatggtctaggagccggcgtaaggctcgctgctctgctccctgccggggctagccgcctcctgccgatcgcccggggctgcgagctgcggcggcccggggctgctcgccgggcggcgcaggccggagaagttagttgtgcgcgcccttagtgcgcggaaccagccagcgagcgagggagcagcgaggcgccgggaccatgggctgggggagccgctgctgctgcccgggacgtttggacctgctgtgcgtgctggcgctgctcgggggctgcctgctccccgtgtgtcggacgcgcgtctacaccaaccactgggcagtcaaaatcgccgggggcttcccggaggccaaccgtatcgccagcaagtacggattcatcaacataggacagataggggccctgaaggactactaccacttctaccatagcaggacgattaaaaggtcagttatctcgagcagagggacccacagtttcatttcaatggaaccaaaggtggaatggatccaacagcaagtggtaaaaaagcggacaaagagggattatgacttcagtcgtgcccagtctacctatttcaatgatcccaagtggcccagcatgtggtatatgcactgcagtgacaatacacatccctgccagtctgacatgaatatcgaaggagcctggaagagaggctacacgggaaagaacattgtggtcactatcctggatgacggaattgagagaacccatccagatctgatgcaaaactacgatgctctggcaagttgcgacgtgaatgggaatgacttggacccaatgcctcgttatgatgcaagcaacgagaacaagcatgggactcgctgtgctggagaagtggcagccgctgcaaacaattcgcactgcacagtcggaattgctttcaacgccaagatcggaggagtgcgaatgctggacggagatgtcacggacatggttgaagcaaaatcagttagcttcaacccccagcacgtgcacatttacagcgccagctggggcccggatgatgatggcaagactgtggacggaccagcccccctcacccggcaagcctttgaaaacggcgttagaatggggcggagaggcctcggctctgtgtttgtttgggcatctggaaatggtggaaggagcaaagaccactgctcctgtgatggctacaccaacagcatctacaccatctccatcagcagcactgcagaaagcggaaagaaaccttggtacctggaagagtgttcatccacgctggccacaacctacagcagcggggagtcctacgataagaaaatcatcactacagatctgaggcagcgttgcacggacaaccacactgggacgtcagcctcagcccccatggctgcaggcatcattgcgctggccctggaagccaatccgtttctgacctggagagacgtacagcatgttattgtcaggacttcccgtgcgggacatttgaacgctaatgactggaaaaccaatgctgctggttttaaggtgagccatctttatggatttggactgatggacgcagaagccatggtgatggaggcagagaagtggaccaccgttccccggcagcacgtgtgtgtggagagcacagaccgacaaatcaagacaatccgccctaacagtgcagtgcgctccatctacaaagcttcaggctgctcggataaccccaaccgccatgtcaactacctggagcacgtcgttgtgcgcatcaccatcacccaccccaggagaggagacctggccatctacctgacctcgccctctggaactaggtctcagcttttggccaacaggctatttgatcactccatggaaggattcaaaaactgggagttcatgaccattcattgctggggagaaagagctgctggtgactgggtccttgaagtttatgatactccctctcagctaaggaactttaagactccaggtaaattgaaagaatggtctttggtcctctacggcacctccgtgcagccatattcaccaaccaatgaatttccgaaagtggaacggttccgctatagccgagttgaagaccccacagacgactatggcacagaggattatgcaggtccctgcgaccctgagtgcagtgaggttggctgtgacgggccaggaccagaccactgcaatgactgtttgcactactactacaagctgaaaaacaataccaggatctgtgtctccagctgcccccctggccactaccacgccgacaagaagcgctgcaggaagtgtgcccccaactgtgagtcctgctttgggagccatggtgaccaatgcatgtcctgcaaatatggatactttctgaatgaagaaaccaacagctgtgttactcactgccctgatgggtcatatcaggataccaagaaaaatctttgccggaaatgcagtgaaaactgcaagacatgtactgaattccataactgtacagaatgtagggatgggttaagcctgcagggatcccggtgctctgtctcctgtgaagatggacggtatttcaacggccaggactgccagccctgccaccgcttctgcgccacttgtgctggggcaggagctgatgggtgcattaactgcacagagggctacttcatggaggatgggagatgcgtgcagagctgtagtatcagctattactttgaccactcttcagagaatggatacaaatcctgcaaaaaatgtgatatcagttgtttgacgtgcaatggcccaggattcaagaactgtacaagctgccctagtgggtatctcttagacttaggaatgtgtcaaatgggagccatttgcaaggatgcaacggaagagtcctgggcggaaggaggcttctgtatgcttgtgaaaaagaacaatctgtgccaacggaaggttcttcaacaactttgctgcaaaacatgtacatttcaaggctgagcagccatcttagatttctttgttcctgtagacttatagattattccatattattaaaaagaaaaaaaaaagccaaaaag

SEQ ID NO: 74 - DNA, 810 bp, Homo sapiens
agcagaggggctgagaccaaaccagaaacctccaattctcatgtggaagcccatgccctcaccctccaacatgaaagcctctgcagcacttctgtgtctgctgctcacagcagctgctttcagcccccaggggcttgctcagccagttgggattaatacttcaactacctgctgctacagatttatcaataagaaaatccctaagcagaggctggagagctacagaaggaccaccagtagccactgtccccgggaagctgtaatcttcaagaccaaactggacaaggagatctgtgctgaccccacacagaagtgggtccaggactttatgaagcacctggacaagaaaacccaaactccaaagctttgaacattcatgactgaactaaaaacaagccatgacttgagaaacaaataatttgtataccctgtcctttctcagagtggttctgagattattttaatctaattctaaggaatatgagctttatgtaataatgtgaatcatggtttttcttagtagattttaaaagttattaatattttaatttaatcttccatggattttggtgggttttgaacataaagccttggatgtatatgtcatctcagtgctgtaaaaactgtgggatgctcctcccttctctacctcatgggggtattgtataagtccttgcaagaatcagtgcaaagatttgctttaattgttaagatatgatgtccctatggaagcatattgttattatataattacatatttgcatatgtatgactcccaaattttcacataaaatagatttttgtaaaaaa

SEQ ID NO: 75 - DNA, 696 bp, Homo sapiens
ttccccccccccccccccccccccgcccgagcacaggacacagctgggttctgaagcttctgagttctgcagcctcacctctgagaaaacctcttttccaccaataccatgaagctctgcgtgactgtcctgtctctcctcatgctagtagctgccttctgctctccagcgctctcagcaccaatgggctcagaccctcccaccgcctgctgcttttcttacaccgcgaggaagcttcctcgcaactttgtggtagattactatgagaccagcagcctctgctcccagccagctgtggtattccaaaccaaaagaagcaagcaagtctgtgctgatcccagtgaatcctgggtccaggagtacgtgtatgacctggaactgaactgagctgctcagagacaggaagtcttcagggaaggtcacctgagcccggatgcttctccatgagacacatctcctccatactcaggactcctctccgcagttcctgtcccttctcttaatttaatcttttttatgtgccgtgttattgtattaggtgtcatttccattatttatattagtttagccaaaggataagtgtcctatggggatggtccactgtcactgtttctctgctgttgcaaatacatggataacacatttgattctgtgtgttttccataataaaactttaaaataaaatgcagacagtta

SEQ ID NO: 76 - DNA, 1984 bp, Homo sapiens
gaagagaccatatttgttcgcagaggaagccgttgctttctgggatctggctacggcagaaaagacatcggctccaacaggggtgttccacagggtagctgggagttggaagagccaagaacgcctccgagctctggatttgagcttctctgcccatgggtgaagcgcccatgctcagcttgtgagcttcttcccgggagagcagccatggcactgaggaatgtgccctttcgctcagaggtcctgggctgggaccccgacagccttgctgactatttcaagaagctcaactataaggactgtgagaaggcagtgaagaagtaccacatcgatggggctcgcttcttgaacctgacagaaaatgacatccagaagttccccaagctccgggtgccgattctcagtaagttaagtcaggaaatcaacaagaacgaagagaggaggagcatcttcacacgcaaaccccaagtcccgcggtttcctgaagagacagaaagccacgaagaggacaatgggggttggtcgtcctttgaagaagacgattatgaaagtcccaatgatgaccaggatggggaggatgatggagactatgagtcccccaatgaggaggaagaggcacccgtggaagatgacgcggattatgagccgccaccctccaatgacgaggaagctctgcagaactccatcctgcctgccaagcctttccccaactccaactccatgtacatcgaccggcccccctctgggaaaaccccccagcagcctcctgtgcccccccagagaccgatggccgccctcccgcccccaccagccggccggaatcactcgccactgcccccaccccagaccaaccacgaagaacccagcagaagcagaaaccacaaaacggcaaagctccctgctccttcaatagacagaagcacgaaacctcccctagatcgttcattagctccgtttgatagagaacccttcacactaggaaagaaaccaccattttctgacaagccctcgattccagcgggaaggtcactcggggagcatttacccaagattcaaaagcctcctttaccaccgaccacggaaagacatgaaaggagcagccccctgccagggaagaagccacctgtgccaaagcatggatggggaccagacagaagagagaatgatgaagatgatgtgcatcagagacctttgccccagccagcactacttcctatgagctccaacactttcccttcaagatctactaagccaagtcccatgaaccctctcccatcctctcacatgcctggagcattctcagaaagtaacagcagttttccacagagtgcctccctgccaccatacttctctcaaggccctagcaacagaccacctatcagagccgaaggcagaaacttccccttgccacttccaaacaaacctcggcccccatcccccgcggaggaagagaattcattaaatgaagagtggtacgtttcttatattacccgaccagaggcagaagctgctcttagaaagataaaccaggatggcacatttctggtcagagacagctctaaaaaaacaacaaccaatccatatgtcctcatggtgttgtacaaagataaagtttacaacatccagatccgttatcagaaggaaagtcaagtttacttgttgggaactggactccgagggaaagaggactttctgtctgtgtcagatattattgactacttcaggaaaatgccacttctgctcattgatgggaaaaaccgaggttccagataccagtgcacattaacgcatgctgcagggtacccatagcaagttatagccgagcaaatgaaccgtcctcctgcctctgttgccaacacgagatcaatcagccttggtcaatggacaaacacttaggactgaactgaacccctccccatgaacacaagggttttatcctttcctttaaaaacagtgtttgaaatgaagactgtcaactatcccc

SEQ ID NO: 77 - DNA, 3655 bp, Homo sapiens
cttcagatagattatatctggagtgaaggatcctgccacctacgtatctggcatagtattctgtgtagtgggatgagcagagaacaaaaacaaaataatccagtgagaaaagcccgtaaataaaccttcagaccagagatctattctccagcttattttaagctcaacttaaaaagaagaactgttctctgattcttttcgccttcaatacacttaatgatttaactccaccctccttcaaaagaaacagcatttcctacttttatactgtctatatgattgatttgcacagctcatctggccagaagagctgagacatccgttcccctacaagaaactctccccgggtggaacaagatggattatcaagtgtcaagtccaatctatgacatcaattattatacatcggagccctgccaaaaaatcaatgtgaagcaaatcgcagcccgcctcctgcctccgctctactcactggtgttcatctttggttttgtgggcaacatgctggtcatcctcatcctgataaactgcaaaaggctgaagagcatgactgacatctacctgctcaacctggccatctctgacctgtttttccttcttactgtccccttctgggctcactatgctgccgcccagtgggactttggaaatacaatgtgtcaactcttgacagggctctattttataggcttcttctctggaatcttcttcatcatcctcctgacaatcgataggtacctggctgtcgtccatgctgtgtttgctttaaaagccaggacggtcacctttggggtggtgacaagtgtgatcacttgggtggtggctgtgtttgcgtctctcccaggaatcatctttaccagatctcaaaaagaaggtcttcattacacctgcagctctcattttccatacagtcagtatcaattctggaagaatttccagacattaaagatagtcatcttggggctggtcctgccgctgcttgtcatggtcatctgctactcgggaatcctaaaaactctgcttcggtgtcgaaatgagaagaagaggcacagggctgtgaggcttatcttcaccatcatgattgtttattttctcttctgggctccctacaacattgtccttctcctgaacaccttccaggaattctttggcctgaataattgcagtagctctaacaggttggaccaagctatgcaggtgacagagactcttgggatgacgcactgctgcatcaaccccatcatctatgcctttgtcggggagaagttcagaaactacctcttagtcttcttccaaaagcacattgccaaacgcttctgcaaatgctgttctattttccagcaagaggctcccgagcgagcaagctcagtttacacccgatccactggggagcaggaaatatctgtgggcttgtgacacggactcaagtgggctggtgacccagtcagagttgtgcacatggcttagttttcatacacagcctgggctgggggtggggtgggagaggtcttttttaaaaggaagttactgttatagagggtctaagattcatccatttatttggcatctgtttaaagtagattagatcttttaagcccatcaattatagaaagccaaatcaaaatatgttgatgaaaaatagcaacctttttatctccccttcacatgcatcaagttattgacaaactctcccttcactccgaaagttccttatgtatatttaaaagaaagcctcagagaattgctgattcttgagtttagtgatctgaacagaaataccaaaattatttcagaaatgtacaactttttacctagtacaaggcaacatataggttgtaaatgtgtttaaaacaggtctttgtcttgctatggggagaaaagacatgaatatgattagtaaagaaatgacacttttcatgtgtgatttcccctccaaggtatggttaataagtttcactgacttagaaccaggcgagagacttgtggcctgggagagctggggaagcttcttaaatgagaaggaatttgagttggatcatctattgctggcaaagacagaagcctcactgcaagcactgcatgggcaagcttggctgtagaaggagacagagctggttgggaagacatggggaggaaggacaaggctagatcatgaagaaccttgacggcattgctccgtctaagtcatgagctgagcagggagatcctggttggtgttgcagaaggtttactctgtggccaaaggagggtcaggaaggatgagcatttagggcaaggagaccaccaacagccctcaggtcagggtgaggatggcctctgctaagctcaaggcgtgaggatgggaaggagggaggtattcgtaaggatgggaaggagggaggtattcgtgcagcatatgaggatgcagagtcagcagaactggggtggatttggtttggaagtgagggtcagagaggagtcagagagaatccctagtcttcaagcagattggagaaacccttgaaaagacatcaagcacagaaggaggaggaggaggtttaggtcaagaagaagatggattggtgtaaaaggatgggtctggtttgcagagcttgaacacagtctcacccagactccaggctgtctttcactgaatgcttctgacttcatagatttccttcccatcccagctgaaatactgaggggtctccaggaggagactagatttatgaatacacgaggtatgaggtctaggaacatacttcagctcacacatgagatctaggtgaggattgattacctagtagtcatttcatgggttgttgggaggattctatgaggcaaccacaggcagcatttagcacatactacacattcaataagcatcaaactcttagttactcattcagggatagcactgagcaaagcattgagcaaaggggtcccatataggtgagggaagcctgaaaaactaagatgctgcctgcccagtgcacacaagtgtaggtatcattttctgcatttaaccgtcaataggcaaaggggggaagggacatattcatttggaaataagctgccttgagccttaaaacccacaaaagtacaatttaccagcctccgtatttcagactgaatgggggtggggggggcgccttaggtacttattccagatgccttctccagacaaaccagaagcaacagaaaaaatcgtctctccctccctttgaaatgaatataccccttagtgtttgggtatattcatttcaaagggagagagagaggtttttttctgttctttctcatatgattgtgcacatacttgagactgttttgaatttgggggatggctaaaaccatcatagtacaggtaaggtgagggaatagtaagtggtgagaactactcagggaatgaaggtgtcagaataataagaggtgctactgactttctcagcctctgaatatgaacggtgagcattgtggctgtcagcaggaagcaacgaagggaaatgtctttccttttgctcttaagttgtggagagtgcaacagtagcataggaccctaccctctgggccaagtcaaagacattctgacatcttagtatttgcatattcttatgtatgtgaaagttacaaattgcttgaaagaaaatatgcatctaataaaaaacaccttcta

SEQ ID NO: 78 - DNA, 1813 bp, Homo sapiens
ccgtccccggcggccccatgccccgatgccccgcgggggccatggacgaggggcccgtggacctgcgcacccggcccaaggccgccggactcccgggcgccgcgctgccgctccgcaagcgcccgctgcgcgcgccctccccggagcccgccgctccccgcggcgctgcgggccttgtcgtccccctggaccctctgcgcggcggctgcgacctgccggcggtccccgggcccccccacggcctggcccggccggaggcgctttactaccccggagccttactgcctttgtaccccactcgggccatgggctccccgtttcctctggtgaacctgcctacacccctataccccatgatgtgccccatggaacaccccctttctgctgacatcgccatggccacccgtgcagatgaggacggagacacgcctctccatattgctgtggtgcagggtaacctgccagctgtgcaccggctggtcaacctcttccagcaggggggccgggagctcgacatctacaacaacctacggcagacaccgctccacctggctgtgatcaccacattaccgtctgtggtccggctcctggtgacagctggtgccagccccatggcgctggaccgccatggccagacggccgctcacctggcgtgcgagcaccgcagcccgacctgcctgcgagccctgctggacagcgcagctccgggcacgttggacctggaggcccgcaattatgacgggctcaccgccctgcacgtggcagtgaacaccgagtgccaagaaaccgtgcagctcttgctagagcgcggtgccgacatcgacgcagtggacattaagagcggccgctccccgctcatccacgccgtggaaaacaacagccttagcatggtgcagctgctgctgcagcacggcgccaacgtgaacgcgcaaatgtactccggcagctccgccctgcactcagcgtccggccgcgggctcctcccgctggtgcgcacgctggtccgcagcggcgctgacagcagcctcaagaactgccacaacgacacgccgctcatggtggcgcgcagccgcagggtcatcgacatcctgagggggaaggccacccggcctgcttccacctcccagccagacccctcccctgaccggagcgccaacacctcccccgagagcagcagccgcctcagctccaatggtcttctctccgcatcaccatcctcctcaccctcccagtctccccccagggacccccctggattccccatggctcctcccaatttcttccttccttccccatctccacccgccttcctgccctttgctggggtcctccgaggccctggccggccggtgcccccctccccagctccaggaggcagctgagggggatgggggggcagatcttggactcatgaggaggggcccccctgcccagaggggtcaacccttctggaaactgtgaagatctgacttcgcccccccccccccccatcttcgggaccaggatttgcacagaagcacatgcacctacccatacaccccctcttctgagcacagatgttcccccatctcgctccctcccaggactctgaccccagcattctcaggcaccagtccctgtccggaatgccacccacatcttccatttccatgtcccctcccagagctggtggacccagggaacagccactcccctccactctctaccagataactgaggaggggagaggtgggccgtaacgggcacggatcacgatgtaaattattaagcattttggttggatttcttttgtaataaactatttttgtaccat

SEQ ID NO: 79 - DNA, 2439 bp, Homo sapiens
cagcacccagctccccgccaccgccatggtccccgacaccgcctgcgttcttctgctcaccctggctgccctcggcgcgtccggacagggccagagcccgttgggctcagacctgggcccgcagatgcttcgggaactgcaggaaaccaacgcggcgctgcaggacgtgcgggactggctgcggcagcaggtcagggagatcacgttcctgaaaaacacggtgatggagtgtgacgcgtgcgggatgcagcagtcagtacgcaccggcctacccagcgtgcggcccctgctccactgcgcgcccggcttctgcttccccggcgtggcctgcatccagacggagagcggcggccgctgcggcccctgccccgcgggcttcacgggcaacggctcgcactgcaccgacgtcaacgagtgcaacgcccacccctgcttcccccgagtccgctgtatcaacaccagcccggggttccgctgcgaggcttgcccgccggggtacagcggccccacccaccagggcgtggggctggctttcgccaaggccaacaagcaggtttgcacggacatcaacgagtgtgagaccgggcaacataactgcgtccccaactccgtgtgcatcaacacccggggctccttccagtgcggcccgtgccagcccggcttcgtgggcgaccaggcgtccggctgccagcgcggcgcacagcgcttctgccccgacggctcgcccagcgagtgccacgagcatgcagactgcgtcctagagcgcgatggctcgcggtcgtgcgtgtgtcgcgttggctgggccggcaacgggatcctctgtggtcgcgacactgacctagacggcttcccggacgagaagctgcgctgcccggagccgcagtgccgtaaggacaactgcgtgactgtgcccaactcagggcaggaggatgtggaccgcgatggcatcggagacgcctgcgatccggatgccgacggggacggggtccccaatgaaaaggacaactgcccgctggtgcggaacccagaccagcgcaacacggacgaggacaagtggggcgatgcgtgcgacaactgccggtcccagaagaacgacgaccaaaaggacacagaccaggacggccggggcgatgcgtgcgacgacgacatcgacggcgaccggatccgcaaccaggccgacaactgccctagggtacccaactcagaccagaaggacagtgatggcgatggtataggggatgcctgtgacaactgtccccagaagagcaacccggatcaggcggatgtggaccacgactttgtgggagatgcttgtgacagcgatcaagaccaggatggagacggacatcaggactctcgggacaactgtcccacggtgcctaacagtgcccaggaggactcagaccacgatggccagggtgatgcctgcgacgacgacgacgacaatgacggagtccctgacagtcgggacaactgccgcctggtgcctaaccccggccaggaggacgcggacagggacggcgtgggcgacgtgtgccaggacgactttgatgcagacaaggtggtagacaagatcgacgtgtgtccggagaacgctgaagtcacgctcaccgacttcagggccttccagacagtcgtgctggacccggagggtgacgcgcagattgaccccaactgggtggtgctcaaccagggaagggagatcgtgcagacaatgaacagcgacccaggcctggctgtgggttacactgccttcaatggcgtggacttcgagggcacgttccatgtgaacacggtcacggatgacgactatgcgggcttcatctttggctaccaggacagctccagcttctacgtggtcatgtggaagcagatggagcaaacgtattggcaggcgaaccccttccgtgctgtggccgagcctggcatccaactcaaggctgtgaagtcttccacaggccccggggaacagctgcggaacgctctgtggcatacaggagacacagagtcccaggtgcggctgctgtggaaggacccgcgaaacgtgggttggaaggacaagaagtcctatcgttggttcctgcagcaccggccccaagtgggctacatcagggtgcgattctatgagggccctgagctggtggccgacagcaacgtggtcttggacacaaccatgcggggtggccgcctgggggtcttctgcttctcccaggagaacatcatctgggccaacctgcgttaccgctgcaatgacaccatcccagaggactatgagacccatcagctgcggcaagcctagggaccagggtgaggacccgccggatgacagccaccctcaccgcggctggatgggggctctgcacccagcccaaggggtggccgtcctgagggggaagtgagaagggctcagagaggacaaaataaagtgtgtgtgcaggg

SEQ ID NO: 80 - DNA, 2580 bp, Homo sapiens
tcgggccccgcggccgcctttataaggcggcgggggtggtggcccgggccgcgttgcgctcccgccactccgcgcccgctatcctggctccgtgctcccacgcgcttgtgcctggacggaccctcgccagtgctctgcgcaggattggaacatcagttaacatctgaccactgccagcccaccccctcccacccacgtcgattgcatctctgggctccagggataaagcaggtcttggggtgcaccatgatttcaccattcttagtactggccattggcacctgccttactaactccttagtgccagagaaagagaaagaccccaagtactggcgagaccaagcgcaagagacactgaaatatgccctggagcttcagaagctcaacaccaacgtggctaagaatgtcatcatgttcctgggagatgggatgggtgtctccacagtgacggctgcccgcatcctcaagggtcagctccaccacaaccctggggaggagaccaggctggagatggacaagttccccttcgtggccctctccaagacgtacaacaccaatgcccaggtccctgacagcgccggcaccgccaccgcctacctgtgtggggtgaaggccaatgagggcaccgtgggggtaagcgcagccactgagcgttcccggtgcaacaccacccaggggaacgaggtcacctccatcctgcgctgggccaaggacgctgggaaatctgtgggcattgtgaccaccacgagagtgaaccatgccacccccagcgccgcctacgcccactcggctgaccgggactggtactcagacaacgagatgccccctgaggccttgagccagggctgtaaggacatcgcctaccagctcatgcataacatcagggacattgacgtgatcatggggggtggccggaaatacatgtaccccaagaataaaactgatgtggagtatgagagtgacgagaaagccaggggcacgaggctggacggcctggacctcgttgacacctggaagagcttcaaaccgagatacaagcactcccacttcatctggaaccgcacggaactcctgacccttgacccccacaatgtggactacctattgggtctcttcgagccaggggacatgcagtacgagctgaacaggaacaacgtgacggacccgtcactctccgagatggtggtggtggccatccagatcctgcggaagaaccccaaaggcttcttcttgctggtggaaggaggcagaattgaccacgggcaccatgaaggaaaagccaagcaggccctgcatgaggcggtggagatggaccgggccatcgggcaggcaggcagcttgacctcctcggaagacactctgaccgtggtcactgcggaccattcccacgtcttcacatttggtggatacaccccccgtggcaactctatctttggtctggcccccatgctgagtgacacagacaagaagcccttcactgccatcctgtatggcaatgggcctggctacaaggtggtgggcggtgaacgagagaatgtctccatggtggactatgctcacaacaactaccaggcgcagtctcctgtgcccctgcgccacgagacccacggcggggaggacgtggccgtcttctccaagggccccatggcgcacctgctgcacggcgtccacgagcagaactacgtcccccacgtgatggcgtatgcagcctgcatcggggccaacctcggccactgtgctcctgccagctcggcaggcagccttgctgcaggccccctgctgctcgctctggccctctaccccctgagcgtcctgttctgagggcccagggcccgggcacccacaagcccgtgacagatgccaacttcccacacggcagcccccccctcaaggggcagggaggtgggggcctcctcagcctctgcaactgcaagaaaggggacccaggaaaccaaagtctgccgcccacctcgctcccctctggaatcttccccaagggccaaacccacttctggcctccagcctttgctccctccccgctgccctttggccaccagggtagatttctcttgggcaggcagagagtacagactgcagacattctcaaagcctcttatttttctagcgaacgtatttctccagacccagaggccctgaagcctccgtggaacattgtggatctgaccctcccagtctcatctcctgaccctcccactcccatctccttacctctggaaccccccaggccctacaatgctcatgtccctgtccccaggcgagccctccttcaggggagttgaggtctttctcctcaggacaaggccttgctcactcactcactccaagaccaccagggtcccaggaagccggtgcctgggtggccatcctacccagcgtgcccaggccgggaagagccacctggcagggctcacactcctgggctctgaacacacacgccagctcctctctgaagcgactctcctgtttggaacggcaaaaaaaaatttttttttctctttttggtggtggttaaaagggaacacaaaacatttaaataaaactttccaaatatttccgagg

SEQ ID NO: 81 - DNA, 8027 bp, Homo sapiens
acgcccgcgccggctgtgctgcacagggggaggagagggaaccccaggcgcgagcgggaagaggggacctgcagccacaacttctctggtcctctgcatcccttctgtccctccacccgtccccttccccaccctctggcccccaccttcttggaggcgacaacccccgggaggcattagaagggatttttcccgcagttgcgaagggaagcaaacttggtggcaacttgcctcccggtgcgggcgtctctcccccaccgtctcaacatgcttaggggtccggggcccgggctgctgctgctggccgtccagtgcctggggacagcggtgccctccacgggagcctcgaagagcaagaggcaggctcagcaaatggttcagccccagtccccggtggctgtcagtcaaagcaagcccggttgttatgacaatggaaaacactatcagataaatcaacagtgggagcggacctacctaggcaatgcgttggtttgtacttgttatggaggaagccgaggttttaactgcgagagtaaacctgaagctgaagagacttgctttgacaagtacactgggaacacttaccgagtgggtgacacttatgagcgtcctaaagactccatgatctgggactgtacctgcatcggggctgggcgagggagaataagctgtaccatcgcaaaccgctgccatgaagggggtcagtcctacaagattggtgacacctggaggagaccacatgagactggtggttacatgttagagtgtgtgtgtcttggtaatggaaaaggagaatggacctgcaagcccatagctgagaagtgttttgatcatgctgctgggacttcctatgtggtcggagaaacgtgggagaagccctaccaaggctggatgatggtagattgtacttgcctgggagaaggcagcggacgcatcacttgcacttctagaaatagatgcaacgatcaggacacaaggacatcctatagaattggagacacctggagcaagaaggataatcgaggaaacctgctccagtgcatctgcacaggcaacggccgaggagagtggaagtgtgagaggcacacctctgtgcagaccacatcgagcggatctggccccttcaccgatgttcgtgcagctgtttaccaaccgcagcctcacccccagcctcctccctatggccactgtgtcacagacagtggtgtggtctactctgtggggatgcagtggctgaagacacaaggaaataagcaaatgctttgcacgtgcctgggcaacggagtcagctgccaagagacagctgtaacccagacttacggtggcaactcaaatggagagccatgtgtcttaccattcacctacaatggcaggacgttctactcctgcaccacggaagggcgacaggacggacatctttggtgcagcacaacttcgaattatgagcaggaccagaaatactctttctgcacagaccacactgttttggttcagactcgaggaggaaattccaatggtgccttgtgccacttccccttcctatacaacaaccacaattacactgattgcacttctgagggcagaagagacaacatgaagtggtgtgggaccacacagaactatgatgccgaccagaagtttgggttctgccccatggctgcccacgaggaaatctgcacaaccaatgaaggggtcatgtaccgcattggagatcagtgggataagcagcatgacatgggtcacatgatgaggtgcacgtgtgttgggaatggtcgtggggaatggacatgcattgcctactcgcagcttcgagatcagtgcattgttgatgacatcacttacaatgtgaacgacacattccacaagcgtcatgaagaggggcacatgctgaactgtacatgcttcggtcagggtcggggcaggtggaagtgtgatcccgtcgaccaatgccaggattcagagactgggacgttttatcaaattggagattcatgggagaagtatgtgcatggtgtcagataccagtgctactgctatggccgtggcattggggagtggcattgccaacctttacagacctatccaagctcaagtggtcctgtcgaagtatttatcactgagactccgagtcagcccaactcccaccccatccagtggaatgcaccacagccatctcacatttccaagtacattctcaggtggagacctaaaaattctgtaggccgttggaaggaagctaccataccaggccacttaaactcctacaccatcaaaggcctgaagcctggtgtggtatacgagggccagctcatcagcatccagcagtacggccaccaagaagtgactcgctttgacttcaccaccaccagcaccagcacacctgtgaccagcaacaccgtgacaggagagacgactcccttttctcctcttgtggccacttctgaatctgtgaccgaaatcacagccagtagctttgtggtctcctgggtctcagcttccgacaccgtgtcgggattccgggtggaatatgagctgagtgaggagggagatgagccacagtacctggatcttccaagcacagccacttctgtgaacatccctgacctgcttcctggccgaaaatacattgtaaatgtctatcagatatctgaggatggggagcagagtttgatcctgtctacttcacaaacaacagcgcctgatgcccctcctgacccgactgtggaccaagttgatgacacctcaattgttgttcgctggagcagaccccaggctcccatcacagggtacagaatagtctattcgccatcagtagaaggtagcagcacagaactcaaccttcctgaaactgcaaactccgtcaccctcagtgacttgcaacctggtgttcagtataacatcactatctatgctgtggaagaaaatcaagaaagtacacctgttgtcattcaacaagaaaccactggcaccccacgctcagatacagtgccctctcccagggacctgcagtttgtggaagtgacagacgtgaaggtcaccatcatgtggacaccgcctgagagtgcagtgaccggctaccgtgtggatgtgatccccgtcaacctgcctggcgagcacgggcagaggctgcccatcagcaggaacacctttgcagaagtcaccgggctgtcccctggggtcacctattacttcaaagtctttgcagtgagccatgggagggagagcaagcctctgactgctcaacagacaaccaaactggatgctcccactaacctccagtttgtcaatgaaactgattctactgtcctggtgagatggactccacctcgggcccagataacaggataccgactgaccgtgggccttacccgaagaggccagcccaggcagtacaatgtgggtccctctgtctccaagtaccccctgaggaatctgcagcctgcatctgagtacaccgtatccctcgtggccataaagggcaaccaagagagccccaaagccactggagtctttaccacactgcagcctgggagctctattccaccttacaacaccgaggtgactgagaccaccatcgtgatcacatggacgcctgctccaagaattggttttaagctgggtgtacgaccaagccagggaggagaggcaccacgagaagtgacttcagactcaggaagcatcgttgtgtccggcttgactccaggagtagaatacgtctacaccatccaagtcctgagagatggacaggaaagagatgcgccaattgtaaacaaagtggtgacaccattgtctccaccaacaaacttgcatctggaggcaaaccctgacactggagtgctcacagtctcctgggagaggagcaccaccccagacattactggttatagaattaccacaacccctacaaacggccagcagggaaattctttggaagaagtggtccatgctgatcagagctcctgcacttttgataacctgagtcccggcctggagtacaatgtcagtgtttacactgtcaaggatgacaaggaaagtgtccctatctctgataccatcatcccagctgttcctcctcccactgacctgcgattcaccaacattggtccagacaccatgcgtgtcacctgggctccacccccatccattgatttaaccaacttcctggtgcgttactcacctgtgaaaaatgaggaagatgttgcagagttgtcaatttctccttcagacaatgcagtggtcttaacaaatctcctgcctggtacagaatatgtagtgagtgtctccagtgtctacgaacaacatgagagcacacctcttagaggaagacagaaaacaggtcttgattccccaactggcattgacttttctgatattactgccaactcttttactgtgcactggattgctcctcgagccaccatcactggctacaggatccgccatcatcccgagcacttcagtgggagacctcgagaagatcgggtgccccactctcggaattccatcaccctcaccaacctcactccaggcacagagtatgtggtcagcatcgttgctcttaatggcagagaggaaagtcccttattgattggccaacaatcaacagtttctgatgttccgagggacctggaagttgttgctgcgacccccaccagcctactgatcagctgggatgctcctgctgtcacagtgagatattacaggatcacttacggagaaacaggaggaaatagccctgtccaggagttcactgtgcctgggagcaagtctacagctaccatcagcggccttaaacctggagttgattataccatcactgtgtatgctgtcactggccgtggagacagccccgcaagcagcaagccaatttccattaattaccgaacagaaattgacaaaccatcccagatgcaagtgaccgatgttcaggacaacagcattagtgtcaagtggctgccttcaagttcccctgttactggttacagagtaaccaccactcccaaaaatggaccaggaccaacaaaaactaaaactgcaggtccagatcaaacagaaatgactattgaaggcttgcagcccacagtggagtatgtggttagtgtctatgctcagaatccaagcggagagagtcagcctctggttcagactgcagtaaccaacattgatcgccctaaaggactggcattcactgatgtggatgtcgattccatcaaaattgcttgggaaagcccacaggggcaagtttccaggtacagggtgacctactcgagccctgaggatggaatccatgagctattccctgcacctgatggtgaagaagacactgcagagctgcaaggcctcagaccgggttctgagtacacagtcagtgtggttgccttgcacgatgatatggagagccagcccctgattggaacccagtccacagctattcctgcaccaactgacctgaagttcactcaggtcacacccacaagcctgagcgcccagtggacaccacccaatgttcagctcactggatatcgagtgcgggtgacccccaaggagaagaccggaccaatgaaagaaatcaaccttgctcctgacagctcatccgtggttgtatcaggacttatggtggccaccaaatatgaagtgagtgtctatgctcttaaggacactttgacaagcagaccagctcagggtgttgtcaccactctggagaatgtcagcccaccaagaagggctcgtgtgacagatgctactgagaccaccatcaccattagctggagaaccaagactgagacgatcactggcttccaagttgatgccgttccagccaatggccagactccaatccagagaaccatcaagccagatgtcagaagctacaccatcacaggtttacaaccaggcactgactacaagatctacctgtacaccttgaatgacaatgctcggagctcccctgtggtcatcgacgcctccactgccattgatgcaccatccaacctgcgtttcctggccaccacacccaattccttgctggtatcatggcagccgccacgtgccaggattaccggctacatcatcaagtatgagaagcctgggtctcctcccagagaagtggtccctcggccccgccctggtgtcacagaggctactattactggcctggaaccgggaaccgaatatacaatttatgtcattgccctgaagaataatcagaagagcgagcccctgattggaaggaaaaagacagacgagcttccccaactggtaacccttccacaccccaatcttcatggaccagagatcttggatgttccttccacagttcaaaagacccctttcgtcacccaccctgggtatgacactggaaatggtattcagcttcctggcacttctggtcagcaacccagtgttgggcaacaaatgatctttgaggaacatggttttaggcggaccacaccgcccacaacggccacccccataaggcataggccaagaccatacccgccgaatgtaggacaagaagctctctctcagacaaccatctcatgggccccattccaggacacttctgagtacatcatttcatgtcatcctgttggcactgatgaagaacccttacagttcagggttcctggaacttctaccagtgccactctgacaggcctcaccagaggtgccacctacaacatcatagtggaggcactgaaagaccagcagaggcataaggttcgggaagaggttgttaccgtgggcaactctgtcaacgaaggcttgaaccaacctacggatgactcgtgctttgacccctacacagtttcccattatgccgttggagatgagtgggaacgaatgtctgaatcaggctttaaactgttgtgccagtgcttaggctttggaagtggtcatttcagatgtgattcatctagatggtgccatgacaatggtgtgaactacaagattggagagaagtgggaccgtcagggagaaaatggccagatgatgagctgcacatgtcttgggaacggaaaaggagaattcaagtgtgaccctcatgaggcaacgtgttacgatgatgggaagacataccacgtaggagaacagtggcagaaggaatatctcggtgccatttgctcctgcacatgctttggaggccagcggggctggcgctgtgacaactgccgcagacctgggggtgaacccagtcccgaaggcactactggccagtcctacaaccagtattctcagagataccatcagagaacaaacactaatgttaattgcccaattgagtgcttcatgcctttagatgtacaggctgacagagaagattcccgagagtaaatcatctttccaatccagaggaacaagcatgtctctctgccaagatccatctaaactggagtgatgttagcagacccagcttagagttcttctttctttcttaagccctttgctctggaggaagttctccagcttcagctcaactcacagcttctccaagcatcaccctgggagtttcctgagggttttctcataaatgagggctgcacattgcctgttctgcttcgaagtattcaataccgctcagtattttaaatgaagtgattctaagatttggtttgggatcaataggaaagcatatgcagccaaccaagatgcaaatgttttgaaatgatatgaccaaaattttaagtaggaaagtcacccaaacacttctgctttcacttaagtgtctggcccgcaatactgtaggaacaagcatgatcttgttactgtgatattttaaatatccacagtactcactttttccaaatgatcctagtaattgcctagaaatatctttctcttacctgttatttatcaatttttcccagtatttttatacggaaaaaattgtattgaaaacacttagtatgcagttgataagaggaatttggtataattatggtgggtgattattttttatactgtatgtgccaaagctttactactgtggaaagacaactgttttaataaaagatttacattccaca

SEQ ID NO: 82 - DNA, 1800 bp, Homo sapiens; identical to SEQ ID NO: 14

SEQ ID NO: 83 - DNA, 2863 bp, Homo sapiens
cggaattcaagaaacacaaaatgcagtgggcgtccctcctgctgctggcagggctcttctccctctcccaggcccagtatgaagatgaccctcattggtggttccactacctccgcagccagcagtccacctactacgatccctatgacccttacccgtatgagacctacgagccttacccctatggggtggatgaagggccagcctacacctacggctctccatcccctccagatccccgcgactgcccccaggaatgcgactgcccacccaacttcctcacggccatgtactgtgacaatcgcaacctcaagtacctgcccttcgttccctcccgcatgaagtatgtgtacttccagaacaaccagatcacctccatccaggaaggcgtctttgacaatgccacagggctgctctggattgctctccacggcaaccagatcaccagtgataaggtgggcaggaaggtcttctccaagctgaggcacctggagaggctgtacctggaccacaacaacctgacccggatgcccggtcccctgcctcgatccctgagagagctccatctcgaccacaaccagatctcacgggtccccaacaatgctctggaggggctggagaacctcacggccttgtacctccaacacgatgagatccaggaagtgggcagttccatgaggggcctccggtcactgatcttgctggacctgagttataaccaccttcggaaggtgcctgatgggctgccctcagctcttgagcagctgtacatggagcacaacaatgtctacaccgtccccgatagctacttccggggggcgcccaagctgctgtatgtgcggctgtcccacaacagtctaaccaacaatggcctggcctccaacaccttcaattccagcagcctccttgagctagacctctcctacaaccagctgcagaagatccccccagtcaacaccaacctggagaacctctacctccaaggcaataggatcaatgagttctccatcagcagcttctgcaccgtggtggacgtcgtgaacttctccaagctgcaggtcgtgcgcctggacgggaacgagatcaagcgcagcgccatgcctgccgacgcgcccctctgcctgcgccttgccagcctcatcgagatctgagcagccctggcaccgggtactgggcggagagcccccgtggcatttggcttgatggtttggtttggcttatggaagatctgggacagaccgtgtgacagaagtccacgggcaccctctgtagtcttctttcctgtaggtggggttagggggggcgatcagggacaggcagccttctgctgaggacataggcagaagctcactcttttccagggacagaagtggtggtagatggaaggatccctggatgttccaaccccataaatctcacggctcttaagttcttcccaatgatctgaggtcatggaacttcaaaagtggcatgggcaatagtatataaccatacttttctaacaatccctggctgtctgtgagcagcacttgacagctctccctctgtgctgggctggtcgtgcagttactctgggctcccatttgttgcttctcaaaatatacctcttgcccagctgcctcttctgaaatccacttcacccactccactttcctccacagatgcctcttctgtgccttaagcagagtcaggagaccccaaggcatgtgagcatctgcccagcaacctgtggagacaacccacactgtgtctgagggtgaaaggacaccaggagtcacttctatacctccctaacctcacccctggaaagccaccagattggaggtcaccagcatgatgataatattcatgacctgatgtgggaggagacagccaacctcaggcttagatcaatgtatagggctatattttggcagctgggtagctctttgaaggtggataagacttcagaagaggaaaggccagactttgcttaccatcagcatctgcaatgggccaaacacacctcaaattggctgagttgagaaagcagccccagtagttccattcttgcccagcactttctgcattccaaacagcatcctacctgggtttttatccacaaaggtagcggccacatggtttttaaagtatgagaaacacagtttgtcctctccttttatccaagcaggaagattctatatcctgatggtagagacagactccaggcagccctggacttgctagcccaaagaaggaggatgtggttaatctgtttcacctggtttgtcctaaggccatagttaaaaagtaccagctctggctggggtccgtgaagcccaggccaggcagccaaatcttgcctgtgctgggcatacaaccctctgctttcacatctctgagctatatcctcattagtgaaggtggcttttgctttatagtttggctggggagcacttaattcttcccatttcaaaaggtaatgttgcctggggcttaacccacctgccctttgggcaaggttgggacaaagccatctgggcagtcaggggcaaggactgttggaggagagttagcccaagtataggctctgcccagatgccatcacatccctgatactgtgtatgctttgaagcaccttccctgagaagggaagaggggatctttggactacgttcttggctccagacctggaatccacaaaagccaaaccagctcatttcaacaaaggagctccgatgtgaggggcaaggctgccccctgccccagggctcttcagaaagcatctgcatgtgaacaccatcatgcctttataaaggatccttattacaggaaaagcatgagtggtggctaacctgaccaataaagttattttatgattgcc

SEQ ID NO: 84 - DNA, 876 bp, Homo sapiens
gcgcagaagcggcggcggtggtggcttgtggtgcggcctcaccatacaggaacagggcagacgttagcgtgagtgatcactctcaatcccggggacctggtggccttagtctttcaggtggaacggtgtgcgacatgggaaagaaaaccaagcggacagctgacagttcttcttcagaggatgaggaggagtatgttgtggagaaggtgctagacaggcgcgtggttaagggacaagtggaatatctactgaagtggaaaggcttttctgaggagcacaatacttgggaacctgagaaaaacttggattgccctgagctaatttctgaatttatgaaaaagtataagaagatgaaggagggtgaaaataataaacccagggagaagtcagaaagtaacaagaggaaatccaatttctcaaacagtgccgatgacatcaaatctaaaaaaaagagagagcagagcaatgatatcgctcggggctttgagagaggactggaaccagaaaagatcattggggcaacagattcctgtggtgatttaatgttcctaatgaaatggaaagacacagatgaagctgacctggttcttgcaaaagaagctaatgtgaaatgtccacaaattgtgatagcattttatgaagagagactgacatggcatgcatatcctgaggatgcggaaaacaaagagaaagaaacagcaaagagctaaaggaggggatggtctctgtcatttctctttgtacataatacattcacctccctgcctcctctcctttctacccacccctttctatcctaaacacatccataaaaaatgtgcttatcactgtgctccacaaaaaaaaaaaaaaaaaaaaaaaaaaaaaaaaaaaaaa

SEQ ID NO: 85 - DNA, 1662 bp, Homo sapiens
gcacccggcagcggtctcaggccaagccccctgccagcatggccagcgagttcaagaagaagctcttctggagggcagtggtggccgagttcctggccacgaccctctttgtcttcatcagcatcggttctgccctgggcttcaaatacccggtggggaacaaccagacggcggtccaggacaacgtgaaggtgtcgctggccttcgggctgagcatcgccacgctggcgcagagtgtgggccacatcagcggcgcccacctcaacccggctgtcacactggggctgctgctcagctgccagatcagcatcttccgtgccctcatgtacatcatcgcccagtgcgtgggggccatcgtcgccaccgccatcctctcaggcatcacctcctccctgactgggaactcgcttggccgcaatgacctggctgatggtgtgaactcgggccagggcctgggcatcgagatcatcgggaccctccagctggtgctatgcgtgctggctactaccgaccggaggcgccgtgaccttggtggctcagccccccttgccatcggcctctctgtagcccttggacacctcctggctattgactacactggctgtgggattaaccctgctcggtcctttggctccgcggtgatcacacacaacttcagcaaccactggattttctgggtggggccattcatcgggggagccctggctgtactcatctacgacttcatcctggccccacgcagcagtgacctcacagaccgcgtgaaggtgtggaccagcggccaggtggaggagtatgacctggatgccgacgacatcaactccagggtggagatgaagcccaaatagaaggggtctggcccgggcatccacgtagggggcaggggcaggggcgggcggagggaggggaggggtgaaatccatactgtagacactctgacaagctggccaaagtcacttccccaagatctgccagacctgcatggtcaagcctcttatgggggtgtttctatctctttctttctctttctgtttcctggcctcagagcttcctggggaccaagatttaccaattcacccactcccttgaagttgtggaggaggtgaaagaaagggacccacctgctagtcgcccctcagagcatgatgggaggtgtgccagaaagtcccccctcgccccaaagttgctcaccgactcacctgcgcaagtgcctgggattctaccgtaattgctttgtgcctttgggcaggccctccttcttttcctaacatgcaccttgctcccaatggtgcttggagggggaagagatcccaggaggtgcagtggagggggcaagctttgctccttcagttctgcttgctcccaagcccctgacccgctcggacttactgcctgaccttggaatcgtccctatatcagggcctgagtgacctccttctgcaaagtggcagggaccggcagagctctacaggcctgcagcccctaagtgcaaacacagcatgggtccagaagacgtggtctagaccagggctgctctttccacttgccctgtgttctttccccaggggcatgactgtcgccacacgcctctgcatatatgtctctttggagttggaatttcattatatgttaagaaaataaaggaaaatgacttgtaaggtc

SEQ ID NO: 86 - DNA, 1078 bp, Homo sapiens
cactcgctggtggtgggtgcgccgtgctgagctctggctgtcagtgtgttcgcccgcgtcccctccgcgctctccgcttgtggataactagctgctggttgatcgcactatgactctggaagaagtccgcggccaggacacagttccggaaagcacagccaggatgcagggtgccgggaaagcgctgcatgagttgctgctgtcggcgcagcgtcagggctgcctcactgccggcgtctacgagtcagccaaagtcttgaacgtggaccccgacaatgtgaccttctgtgtgctggctgcgggtgaggaggacgagggcgacatcgcgctgcagatccattttacgctgatccaggctttctgctgcgagaacgacatcgacatagtgcgcgtgggcgatgtgcagcggctggcggctatcgtgggcgccggcgaggaggcgggtgcgccgggcgacctgcactgcatcctcatttcgaaccccaacgaggacgcctggaaggatcccgccttggagaagctcagcctgttttgcgaggagagccgcagcgttaacgactgggtgcccagcatcaccctccccgagtgacagcccggcggggaccttggtctgatcgacgtggtgacgccccggggcgcctagagcgcggctggctctgtggaggggccctccgagggtgcccgagtgcggcgtggagactggcaggcggggggggcgcctggagagcgaggaggcgcggcctcccgaggaggggcccggtggcggcagggccaggctggtccgagctgaggactctgcaagtgtctggagcggctgctcgcccaggaaggcctaggctaggacgttggcctcagggccaggaaggacagactggccgggcaggcgtgactcagcagcctgcgctcggcaggaaggagcggcgccctggacttggtacagtttcaggagcgtgaaggacttaaccgactgccgctgctttttcaaaacggatccgggcaatgcttcgttttctaaaggatgctgctgttgaagctttgaattttacaataaactttttgaaacaaaaaaaaaaaaaaa

SEQ ID NO: 87 - protein, 220 aa, Homo sapiens
MGAAARTLRLALGLLLLATLLRPADACSCSPVHPQQAFCNADVVIRAKAVSEKEVDSGNDIYGNPIKRIQYEIKQIKMFKGPEKDIEFIYTAPSSAVCGVSLDVGGKKEYLIAGKAEGDGKMHITLCDFIVPWDTLSTTQKKSLNHRYQMGCECKITRCPMIPCYISSPDECLWMDWVTEKNINGHQAKFFACIKRSDGSCAWYRGAAPPKQEFLDIEDP

SEQ ID NO: 88 - DNA, 4164 bp, Homo sapiens
cactctggctgggagcagaaggcagcctcggtctctgggcggcggcggcggccctctctgccctggccgcgctgtgtggtgaccgcaggcccgagacatgagggcggcccgtgctctgctgcccctgctgctgcaggcctgctggacagccgcgcaggatgagccggagaccccgagggccgtggccttccaggactgccccgtggacctgttctttgtgctggacacctctgagagcgtggccctgaggctgaagccctacggggccctcgtggacaaagtcaagtccttcaccaagcgcttcatcgacaacctgagggacaggtactaccgctgtgaccgaaacctggtgtggaacgcaggcgcgctgcactacagtgacgaggtggagatcatccaaggcctcacgcgcatgcctggcggccgcgacgcactcaaaagcagcgtggacgcggtcaagtactttgggaagggcacctacaccgactgcgctatcaagaaggggctggagcagctcctcgtggggggctcccacctgaaggagaataagtacctgattgtggtgaccgacgggcaccccctggagggctacaaggaaccctgtggggggctggaggatgctgtgaacgaggccaagcacctgggcgtcaaagtcttctcggtggccatcacacccgaccacctggagccgcgtctgagcatcatcgccacggaccacacgtaccggcgcaacttcacggcggctgactggggccagagccgcgacgcagaggaggccatcagccagaccatcgacaccatcgtggacatgatcaaaaataacgttgagcaagtgtgctgctccttcgaatgccagcctgcaagaggacctccgggcctccggggcgaccccggctttgagggagaacgaggcaagccggggctcccaggagagaagggagaagccggagatcctggaagacccggggacctcggacctgttgggtaccagggaatgaagggagaaaaagggagccgtggggagaagggctccaggggaccaaagggctacaagggagagaagggcaagcgtggcatcgacggggtggacggcgtgaagggggagatggggtacccaggcctgccaggctgcaagggctcgccgggttttgacggcattcaaggaccccctggccccaagggagaccccggcgcctttggactgaaaggagaaaagggcgagcctggagctgacggggaggccgggagaccaggagctcggggaccatctggagacgaggggccagccggagagcctgggccccccggagagaaaggagaggcgggcgacgaggggaacccaggacctgacggtgcccccggggagcggggtggccctggagagagaggaccacgggggaccccaggcccgcggggaccaagaggagaccctggtgaagctggcccgcagggtgatcagggaagagaagggcccgttggtgtccctggagacccgggcgaggctggccctatcggacctaaaggctaccgaggcgatgagggtcccccagggtccgagggtgccagaggagccccaggacctgccggaccccctggagacccggggctgatgggagaaaggggagaagacggccccgctggaaatggcaccgagggcttccccggcttccccgggtatcccgggaacaggggcgctcccgggataaacggcacgaagggctaccccggcctcaagggggacgagggagaagccggggaccccggagacgataacaacgacattgcaccccgaggagtcaaaggagcaaaggggtaccggggtcccgagggcccccagggacccccaggacaccaaggaccgcctgggccggacgaatgcgagattttggacatcatcatgaaaatgtgctcttgctgtgaatgcaagtgcggccccatcgacctcctgttcgtgctggacagctcagagagcattggcctgcagaacttcgagattgccaaggacttcgtcgtcaaggtcatcgaccggctgagccgggacgagctggtcaagttcgagccagggcagtcgtacgcgggtgtggtgcagtacagccacagccagatgcaggagcacgtgagcctgcgcagccccagcatccggaacgtgcaggagctcaaggaagccatcaagagcctgcagtggatggcgggcggcaccttcacgggggaggccctgcagtacacgcgggaccagctgctgccgcccagcccgaacaaccgcatcgccctggtcatcactgacgggcgctcagacactcagagggacaccacaccgctcaacgtgctctgcagccccggcatccaggtggtctccgtgggcatcaaagacgtgtttgacttcatcccaggctcagaccagctcaatgtcatttcttgccaaggcctggcaccatcccagggccggcccggcctctcgctggtcaaggagaactatgcagagctgctggaggatgccttcctgaagaatgtcaccgcccagatctgcatagacaagaagtgtccagattacacctgccccatcacgttctcctccccggctgacatcaccatcctgctggacggctccgccagcgtgggcagccacaactttgacaccaccaagcgcttcgccaagcgcctggccgagcgcttcctcacagcgggcaggacggaccccgcccacgacgtgcgggtggcggtggtgcagtacagcggcacgggccagcagcgcccagagcgggcgtcgctgcagttcctgcagaactacacggccctggccagtgccgtcgatgccatggactttatcaacgacgccaccgacgtcaacgatgccctgggctatgtgacccgcttctaccgcgaggcctcgtccggcgctgccaagaagaggctgctgctcttctcagatggcaactcgcagggcgccacgcccgctgccatcgagaaggccgtgcaggaagcccagcgggcaggcatcgagatcttcgtggtggtcgtgggccgccaggtgaatgagccccacatccgcgtcctggtcaccggcaagacggccgagtacgacgtggcctacggcgagagccacctgttccgtgtccccagctaccaggccctgctccgcggtgtcttccaccagacagtctccaggaaggtggcgctgggctagcccaccctgcacgccggcaccaaaccctgtcctcccacccctccccactcatcactaaacagagcccaagcttggaaagccaggacacaacgctgctgcctgctttgtgcagggtcctccggggctcagccctgagttggcatcacctgcgcagggccctctggggctcagctctgagctagtgtcacctgcacagggccctctgaggctcagccctgagctggcgtcacctgtgcagggccctctggggctcagccctgagctggcctcacctgggttccccaccccgggctctcctgccctgccctcctgcccgccctccctcctgcctgcgcagctccttccctaggcacctctgtgctgcatcccaccagcctgagcaagacgcctctcggggcctgtgccgcactagcctccctctcctctgtccccatagctggtttttcccaccaatcctcacctaacagttactttacaattaaactcaaagcaagctcttctcctcagcttggggcagccattggcctctgtctcgttttgggaaaccaaggtcaggaggccgttgcagacataaatctcggcgactcggccccgtctcctgagggtcctgctggtgaccggcctggaccttggccctacagccctggaggccgctgctgaccagcactgaccccgacctcagagagtactcgcaggggcgctggctgcactcaagaccctcgagattaacggtgctaaccccgtctgctcctccctcccgcagagactggggcctggactggacatgagagccccttggtgccacagagggctgtgtcttactagaaacaacgcaaacctctccttcctcagaatagtgatgtgttcgacgttttatcaaaggccccctttctatgttcatgttagttttgctccttctgtgtttttttctgaaccatatccatgttgctgacttttccaaataaaggttttcactcctc

SEQ ID NO: 89 - DNA, 6093 bp, Homo sapiens
cacacagaagcggcagccaccgaggagggagcagtgccgggagccccgacggcgccttgctgcatggagctgggccgctgacagctgtcgtgcccgcagcctctgacctccctgggaccccggcgtctgaggctcatagtctgctccctgtcttctgtcagcctcagggcatccagcgtctcaggccgacctgtccctgggacccggcgtttcgcttctcagccatggagcggtgcagccgctgccatcgcctcctcctcctcctacctctggtgctggggctgagcgcggccccaggctgggcaggtgcaccccctgtggatgtgctccgggccctgaggttcccctccctccctgatggtgtccggagagcgaaaggcatctgtccagctgatgtggcctaccgagtggcacgacctgcccagctcagtgcacccactcgccagcttttcccaggaggatttcccaaagatttctctctgctgactgttgtccggacccgccctggtctccaagctcccctcctgactctctacagtgcccagggtgtccgacagctgggcctggagctgggccgacctgtccgcttcctgtatgaagaccagacagggcggcctcaacctccctctcagccagtcttccgaggcctcagcctagcagatggcaagtggcaccgtgtggctgtggctgtgaagggccagtctgtcaccctcattgttgactgcaagaagcgagtcacccggcctctcccccgaagtgctcgtccagtattggacacccatggagtgatcatctttggtgcccgtattctggatgaagaagtctttgagggtgatgtccaggagctggccattgtcccaggggtccaggcagcctatgaatcatgtgaacagaaggagctggaatgcgaggggggccagagggaaagaccccaaaaccaacagcctcacagagcccagagatctccacagcagcaaccatcaagacttcacaggccacaaaatcaggaaccccagagccaggctgcccatggaccccgagggctgaagggagagaaaggagagcctgcagtgttggaacctggtatgctcgtggaggggccccctggcccagaagggcctgcgggattgattggtccccctggcatccaggggaacccaggcccagttggagaccctggagagaggggcccccctggccgagcagggctccctggatcagatggggctcctggtcctcctggcacatctctcatgctcccattccggtttggcagtggtgggggtgacaagggccctgtggtggcggcccaggaggctcaggcccaggcgatcctgcagcaggcgaggctggcgctccgtggaccccctggccccatgggatacacagggcgccctggacccttgggccaacctgggagccctggcctgaaaggagagtctggagacttaggacctcagggccccagaggacctcagggcctcacaggctccctgggcaaggctgggcgaaggggccgggcaggtgctgatggagcccgagggatgcctggagatcctggagtgaagggtgaccgaggttttgatggactcccagggctccctggagagaagggccataggggtgatactggtgcccagggccttcctggtccccctggtgaggatggagagaggggagatgacggggagattgggcctcgagggctgcctggagagtcgggacctcgaggtctccttggccccaaaggcccacctggtattcctggaccccctggcgtccgaggcatggatggtccccagggccccaaagggagcttgggaccccagggagagccaggacctcctggacaacagggcacccctgggacccagggtcttcccgggccccagggtgccatcggccctcatggagagaagggtcctcaagggaagccagggctccccggcatgcctggctcagacggacccccgggtcacccagggaaggaaggtccccctggaaccaaaggaaaccagggtccctctggacctcagggacctctaggatacccaggacctcgaggggtcaagggtgtggacggaattcggggtctgaagggtcataagggtgagaagggtgaggatggctttcctgggttcaaaggtgacataggcgtgaaaggtgacaggggcgaagttggagtccctggttccaggggagaggatggtcctgaggggccaaagggacgcactggaccgactggagaccctgggcccccagggctcatgggcgagaagggcaagctgggtgttcctggtctgcctggctatcctggacgtcagggacccaaggggtccctaggatttcctggctttcctggtgccagtggagagaagggagcccggggcctgtcggggaagtcagggcctcggggagaacggggccccacgggtccacggggtcagcggggaccccgaggtgccactgggaagtctggagctaagggaacatctggtggtgatggcccccatggcccccctggagagaggggcctccctggacctcagggtcccaacgggtttcctggaccgaaaggacccccgggcccccctgggaaggacgggctgccgggacacccaggccaaagaggagaagtgggtttccaagggaagaccggcccccctggtcctccaggagtggtgggacctcagggagcagcaggagaaaccggccctatgggggagagaggtcacccaggccccccggggccccctggagagcagggactacctgggacagctggaaaagaaggaacaaagggtgaccctggtccccctggggccccagggaaggatggtcctgctggtctgaggggattcccaggagagagaggcctcccaggcactgctggtggacctggtttgaaggggaatgaaggtccgtctggcccccctggccctgcaggctcccctggggaacgaggtgcagcaggatcagggggacccattggtcgccaggggcgcccaggcccgcagggtccccctggagcagcaggagagaaaggtgtcccaggtgagaagggccccattggcccgactggccgagatggagtgcagggtcctgtggggcttcctggtcctgctgggcctccaggtgtggctggagaggatggagacaagggtgaggtgggggaccccggacagaagggcaccaaagggaacaagggtgaacatggccctcctggaccccctggacccattggtcctgtggggcagcctggagcagcgggagcagatggggagcccggagctcggggaccccagggacactttggagccaaaggtgatgaaggaacaagaggattcaatgggcccccaggacccattggcctacagggtttgccaggcccctctggggagaagggagaaacaggagatgtgggtcctatgggaccacctggccccccaggacctcgaggtccagctggacccaatggcgctgatggcccacaaggtcccccaggaggtgttgggaacctgggtccccctggagagaagggggaaccaggagagtcaggatctccagggatccagggcgagccaggtgtcaagggtccacgcggggaacgtggagagaaaggagagtcggggcagccaggagagccagggccaccaggcgctaaaggcccacagggcgatgatggccccaaagggaaccctggtcctgttggttttcctggtgaccctggcccccctggagaaggtggccctcggggccaggatggtgctaagggtgaccgaggcgaggatggtgagccaggacagcctggatcccctggtcccaccggggagaatggacccccagggccacttggaaagcgaggtcctgctggctcgcctggttccgaggggcgacaaggagggaagggagccaagggagatcctggcgctataggtgccccggggaagacaggcccggtgggtcctgcaggcccagcagggaaacctggccctgatggtctgagggggctcccaggctcagtgggtcagcaaggccgacctggagctacaggccaggctgggcccccaggtcctgtgggacccccagggctgcctggtctccggggcgatgctggagccaagggagagaagggccacccaggtctcattggactgattgggcccccgggtgagcagggagagaagggagatcggggacttcctgggcctcagggctcccctgggcagaagggtgagatgggtatcccaggagcatccggccccattggtcctggaggtccccccggcctccccggacctgctggccccaaaggagccaaaggagccacaggcccaggcggacccaagggagagaagggtgtgcagggccctccaggacacccgggtcccccaggcgaggtgatccagccactgcccattcagatgcccaagaagactcggcgctcggtggatggaagccgtctgatgcaggaagatgaggccataccgaccgggggagcccccggcagtcctggggggctggaggagatctttggctcactcgactccctgcgggaggagatcgagcagatgaggcggccaacagggacccaggacagccctgctcgcacctgccaggacctgaagctgtgccacccagagcttcccgatggagagtactgggtcgaccccaaccagggctgtgctcgggatgccttccgagttttctgcaacttcacagcagggggtgagacctgtgtgacgcctagggatgacgtcacgcagttctcttacgtggactcagagggctccccagtgggtgtggtccagctcaccttcctgcggctgctcagcgtctcagcccaccaggacgtctcctacccctgctctggagcagcccgtgacggtcccctgagactccgtggggccaatgaggatgagctgagcccggagactagcccctatgtcaaagaattcagagatggctgccagacacagcaaggccggacggtgctggaggtgcgaacgcctgtgctggagcagctgccagtgctggatgcctccttctcagacctgggagccccaccgaggcggggaggggtgctgctggggcctgtctgcttcatgggataggaccgtctctgtctgatcctgtccattcggtaccaggcccacctggaatcccacaacatcagctctgtgccacctcccaagagggctcctcactatctagggagccctgggccagggctggagagccctcagtcggggcaggccaggggaggggtgaagtggttgcctggacaccccacgggaggagtggcatctgggctcttggccctcccacctggagcctgttacccgttagagagctgagagcccttatttaaaactcacctcccaatcaccccaaacaaatggaagagaagagaaaggacatggcgtattttgtatttaaaagtaattgtattaattatttaaagtgtggaaagcaaaataacaaaaaagagaaacgccaacaaaaaatcagcagatgttgaagacaggggtctcgggggtgggctccggcacccacatctgagtcaggactttcctcagtgactgtgtgtaggggggttcagggctgaacccacctccctcccaccttcctcccacctcacctgtcgcacccactgtgaaagttggaatatgtggtctccctggcctcagggctctgactctgccagggtggggctctctaacccacaggtgttggctgcctggcccatgtgcccactgtctcttccacttggtctgggtttggcaggcactgctgctacttgagggccaggatgctcccccagggaagaaacggaatagtgtggggtgtgtgcagggctgcatccgcagatggctggaatattaaaattcttctatattggctggtaaattgccatggccctgagccactgagtatgttcattgccacccctgtcctcccctgggcacccctcactttccctgatcctgcaattaaagggttaatgtgtggcatatggaagggactcccaggaccctgtgcccagcttccatgctgactgatggttaaataatgtgattgtctcctcccagg

SEQ ID NO: 90 - DNA, 2871 bp, Homo sapiens
atggagacgcaggaacttcggggggccctggctcttctcctcctttgctttttcacatctgccagtcaggatctgcaggtaattgacctgctgactgtgggcgagtctcggcagatggtagctgtggcagagaagatccggacagccttgctcactgctggggacatctacctcttatccaccttccgcctgccccccaagcagggtggtgtcctctttggcctctattctcgccaagacaacactcgatggctggaggcctctgttgtaggcaagatcaacaaagtactggtgcgataccagcgggaggatggcaaagtccacgccgtgaacctacagcaagcgggcctggctgatgggcgcacacacacagttctcctgcgactccgaggtccctccagacccagccctgccctacatctctacgtggactgcaaactgggtgaccaacatgcaggccttccagcactggcccccattcctccagcggaggtcgatgggctggagattaggactggacagaaggcgtatttgaggatgcagggctttgtggaatctatgaaaattattctgggtgggtccatggcccgggtaggagccctgagtgagtgtccattccaaggggacgagtccatccacagtgcagtgaccaatgcactgcactccattctaggggagcagaccaaggcgctggtcacccaactcaccctcttcaaccagatcctggtggagctgcgggatgatatacgagaccaggtaaaggaaatgtccctgatccgaaacaccattatggagtgtcaggtgtgcggcttccatgagcagcgttcccactgcagccccaatccctgcttccgaggtgtggactgcatggaagtgtacgagtacccaggctaccgctgtgggccctgcccccctggcctgcagggcaacggcacccactgcagtgacatcaatgagtgtgctcacgctgacccctgtttcccgggctccagctgcatcaacaccatgcccggcttccactgtgaggcctgtcctcgagggtacaagggcacacaggtgtctggtgtgggcattgactatgcccgggccagcaaacaggtctgcaatgacatcgatgaatgcaacgatggcaacaatggtggctgtgacccaaactccatctgcaccaacactgtgggctctttcaagtgtggtccctgccgcctgggtttcctgggcaaccagagccagggctgcctcccagcccggacctgccacagcccagcccacagcccctgccacatccatgctcactgtctctttgaacgcaatggtgcagtgtcctgccagtgtaacgtgggctgggctgggaatgggaacgtgtgtgggactgacacagacatcgatggctacccagaccaagcactgccctgcatggacaacaacaaacactgcaaacaggacaactgccttttgacacccaactctgggcaggaagatgctgataatgatggtgtgggggaccagtgtgatgatgatgctgatggggatgggatcaagaatgttgaggacaactgccggctgttccccaacaaagaccagcagaactcagatacagattcatttggtgatgcctgtgacaattgccccaacgttcccaacaatgaccagaaggacacagatggcaatggggaaggagatgcctgtgacaacgacgtggatggggatggcatccccaatggattggacaattgccctaaagtccccaacccactacagacagacagggatgaggacggggtgggagatgcttgcgacagctgccctgaaatgagcaatcctacccagacagatgcagacagcgacctggtgggggatgtctgtgatactaatgaagacagcgatggggatgggcatcaggacaccaaggacaactgcccacagctgccaaatagctcccagctggactctgataacgatggacttggagatgagtgtgatggggatgatgacaatgatggcatcccagattatgtgcctcctggtcccgataactgccgcctggtacccaatcccaatcagaaggactcagatggcaatggcgttggtgatgtgtgtgaggatgactttgacaatgatgctgtggtcgaccccctggatgtgtgtcctgaaagtgcagaggtaacgcttacggattttcgggcctatcagaccgtcgtcctggatcctgagggtgatgctcagattgacccaaactgggttgtgctcaaccagggcatggaaatcgttcagaccatgaacagtgaccctggcttggcagttggatacacggccttcaatggtgtggactttgaaggcaccttccatgtgaacacagtgactgatgatgactacgcaggctttctcttcagttatcaagacagtggccgcttctacgtagtcatgtggaagcagaccgagcagacctactggcaggctacacccttccgggcggttgcccagcccgggctgcagctcaaggcagtgacatcagtgtctggcccaggtgagcacctccgaaatgccctgtggcatactggccacacccctgatcaggtacgactcctgtggacagacccacgaaatgtgggctggcgggacaagacctcctatcgctggcagcttctgcaccggcctcaagttggctacattcgggtgaagctctatgagggaccccagcttgtggcggattctggggtgatcattgacacatccatgcgaggggggcgtcttggtgtattctgcttctcccaagaaaacataatttggtccaatctccagtatcgatgcaatgacacagtgcctgaggactttgagccattccggaggcagctgctccagggaagggtgtga

SEQ ID NO: 91 - DNA, 2479 bp, Homo sapiens
  misc_feature 1146: n = A,T,C or G
ggcacgagggggcggcggctgcgggcgcagagcggagatgcagcggcttggggccaccctgctgtgcctgctgctggcggcggcggtccccacggcccccgcgcccgctccgacggcgacctcggctccagtcaagcccggcccggctctcagctacccgcaggaggaggccaccctcaatgagatgttccgcgaggttgaggaactgatggaggacacgcagcacaaattgcgcagcgcggtggaagagatggaggcagaagaagctgctgctaaagcatcatcagaagtgaacctggcaaacttacctcccagctatcacaatgagaccaacacagacacgaaggttggaaataataccatccatgtgcaccgagaaattcacaagataaccaacaaccagactggacaaatggtcttttcagagacagttatcacatctgtgggagacgaagaaggcagaaggagccacgagtgcatcatcgacgaggactgtgggcccagcatgtactgccagtttgccagcttccagtacacctgccagccatgccggggccagaggatgctctgcacccgggacagtgagtgctgtggagaccagctgtgtgtctggggtcactgcaccaaaatggccaccaggggcagcaatgggaccatctgtgacaaccagagggactgccagccggggctgtgctgtgccttccagagaggcctgctgttccctgtgtgcacacccctgcccgtggagggcgagctttgccatgaccccgccagccggcttctggacctcatcacctgggagctagagcctgatggagccttggaccgatgcccttgtgccagtggcctcctctgccagccccacagccacagcctggtgtatgtgtgcaagccgaccttcgtggggagccgtgaccaagatggggagatcctgctgcccagagaggtccccgatgagtatgaagttggcagcttcatggaggaggtgcgccaggagctggaggacctggagaggagcctgactgaagagatggcgctgggggagcctgcggctgccgccgctgcactgctgggaggggaagagatttagatctggaccaggctgtgggtagatgtgcaatagaaatagctaatttatttccccangtgtgtgctttaagcgtgggctgaccaggcttcttcctacatcttcttcccagtaagtttcccctctggcttgacagcatgaggtgttgtgcatttgttcagctcccccaggctgttctccaggcttcacagtctggtgcttgggagagtcaggcagggttaaactgcaggagcagtttgccacccctgtccagattattggctgctttgcctctaccagttggcagacagccgtttgttctacatggctttgataattgtttgaggggaggagatggaaacaatgtggagtctccctctgattggttttggggaaatgtggagaagagtgccctgctttgcaaacatcaacctggcaaaaatgcaacaaatgaattttccacgcagttctttccatgggcataggtaagctgtgccttcagctgttgcagatgaaatgttctgttcaccctgcattacatgtgtttattcatccagcagtgttgctcagctcctacctctgtgccagggcagcattttcatatccaagatcaattccctctctcagcacagcctggggagggggtcattgttctcctcgtccatcagggatttcagaggctcagagactgcaagctgcttgcccaagtcacacagctagtgaagaccagagcagtttcatctggttgtgactctaagctcagtgctctctccactaccccacaccagccttggtgccaccaaaagtgctccccaaaaggaaggagaatgggatttttcttttgaggcatgcacatctggaattaaggtcaaactaattctcacatccctctaaaagtaaactactgttaggaacagcagtgttctcacagtgtggggcagccgtccttctaatgaagacaatgatattgacactgtccctctttggcagttgcattagtaactttgaaaggtatatgactgagcgtagcatacaggttaacctgcagaaacagtacttaggtaattgtagggcgaggattataaatgaaatttgcaaaatcacttagcagcaactgaagacaattatcaaccacgtggagaaaatcaaaccgagcagggctgtgtgaaacatggttgtaatatgcgactgcgaacactgaactctacgccactccacaaatgatgttttcaggtgtcatggactgttgccaccatgtattcatccagagttcttaaagtttaaagttgcacatgattgtataagcatgctttctttgagttttaaattatgtataaacataagttgcatttagaaatcaagcataaatcacttcaactgctaaaaaaaaaaaaaaaaaaaaaaaaaaaaaaa

SEQ ID NO: 92 - DNA, 2110 bp, Homo sapiens
caggccgaggcagggagaactctccactcggaggaggagctggggtcctcttccatcccgtcttcatcctgcctggctgcgtgacctcgggaggcaccatgcaggagctgcatctgctctggtgggcgcttctcctgggcctggctcaggcctgccctgagccctgcgactgtggggaaaagtatggcttccagatcgccgactgtgcctaccgcgacctagaatccgtgccgcctggcttcccggccaatgtgactacactgagcctgtcagccaaccggctgccaggcttgccggagggtgccttcagggaggtgcccctgctgcagtcgctgtggctggcacacaatgagatccgcacggtggccgccggagccctggcctctctgagccatctcaagagcctggacctcagccacaatctcatctctgactttgcctggagcgacctgcacaacctcagtgccctccaattgctcaagatggacagcaacgagctgaccttcatcccccgcgacgccttccgcagcctccgtgctctgcgctcgctgcaactcaaccacaaccgcttgcacacattggccgagggcaccttcaccccgctcaccgcgctgtcccacctgcagatcaacgagaaccccttcgactgcacctgcggcatcgtgtggctcaagacatgggccctgaccacggccgtgtccatcccggagcaggacaacatcgcctgcacctcaccccatgtgctcaagggtacgccgctgagccgcctgccgccactgccatgctcggcgccctcagtgcagctcagctaccaacccagccaggatggtgccgagctgcggcctggttttgtgctggcactgcactgtgatgtggacgggcagccggcccctcagcttcactggcacatccagatacccagtggcattgtggagatcaccagccccaacgtgggcactgatgggcgtgccctgcctggcacccctgtggccagctcccagccgcgcttccaggcctttgccaatggcagcctgcttatccccgactttggcaagctggaggaaggcacctacagctgcctggccaccaatgagctgggcagtgctgagagctcagtggacgtggcactggccacgcccggtgagggtggtgaggacacactggggcgcaggttccatggcaaagcggttgagggaaagggctgctatacggttgacaacgaggtgcagccatcagggccggaggacaatgtggtcatcatctacctcagccgtgctgggaaccctgaggctgcagtcgcagaaggggtccctgggcagctgcccccaggcctgctcctgctgggccaaagcctcctcctcttcttcttcctcacctccttctagccccacccagggcttccctaactcctccccttgcccctaccaatgcccctttaagtgctgcaggggtctggggttggcaactcctgaggcctgcatgggtgacttcacattttcctacctctccttctaatctcttctagagcacctgctatccccaacttctagacctgctccaaactagtgactaggatagaatttgatcccctaactcactgtctgcggtgctcattgctgctaacagcattgcctgtgctctcctctcaggggcagcatgctaacggggcgacgtcctaatccaactgggagaagcctcagtggtggaattccaggcactgtgactgtcaagctggcaagggccaggattgggggaatggagctggggcttagctgggaggtggtctgaagcagacagggaatgggagaggaggatgggaagtagacagtggctggtatggctctgaggctccctggggcctgctcaagctcctcctgctccttgctgttttctgatgatttgggggcttgggagtccctttgtcctcatctgagactgaaatgtggggatccaggatggcttccttcctcttacccttcctccctcagcctgcaacctctatcctggaacctgtcctccctttctccccaactatgcatctgttgtctgctcctctgcaaaggccagccagcttgggagcagcagagaaataaacagcatttctgatgcc

SEQ ID NO: 93 - DNA, 1755 bp, Homo sapiens
cctcggctccggaatcactgcagcccccctcgccctgagccagagcaccccgggtcccgccagcccctcacactcccagcaaaatgggcaaggagaagacccacatcaacatcgtggtcatcggccacgtggactccggaaagtccaccaccacgggccacctcatctacaaatgcggaggtattgacaaaaggaccattgagaagttcgagaaggaggcggctgagatggggaagggatccttcaagtatgcctgggtgctggacaagctgaaggcggagcgtgagcgcggcatcaccatcgacatctccctctggaagttcgagaccaccaagtactacatcaccatcatcgatgcccccggccaccgcgacttcatcaagaacatgatcacgggtacatcccaggcggactgcgcagtgctgatcgtggcggcgggcgtgggcgagttcgaggcgggcatctccaagaatgggcagacgcgggagcatgccctgctggcctacacgctgggtgtgaagcagctcatcgtgggcgtgaacaaaatggactccacagagccggcctacagcgagaagcgctacgacgagatcgtcaaggaagtcagcgcctacatcaagaagatcggctacaacccggccaccgtgccctttgtgcccatctccggctggcacggcgacaacatgctggagccctcccccaacatgccgtggttcaagggctggaaggtggagcgtaaggagggcaacgcaagcggcgtgtccctgctggaggccctggacaccatcctgccccccacgcgccccacggacaagcccctgcgcctgccgctgcaggacgtgtacaagattggcggcattggcacggtgcccgtgggccgggtggagaccggcatcctgcggccgggcatggtggtgacctttgcgccagtgaacatcaccactgaggtgaagtcagtggagatgcaccacgaggctctgagcgaagctctgcccggcgacaacgtcggcttcaatgtgaagaacgtgtcggtgaaggacatccggcggggcaacgtgtgtggggacagcaagtctgacccgccgcaggaggctgctcagttcacctcccaggtcatcatcctgaaccacccggggcagattagcgccggctactccccggtcatcgactgccacacagcccacatcgcctgcaagtttgcggagctgaaggagaagattgaccggcgctctggcaagaagctggaggacaaccccaagtccctgaagtctggagacgcggccatcgtggagatggtgccgggaaagcccatgtgtgtggagagcttctcccagtacccgcctctcggccgcttcgccgtgcgcgacatgaggcagacggtggccgtaggcgtcatcaagaacgtggaaaagaagagcggcggcgccggcaaggtcaccaagtcggcgcagaaggcgcagaaggcgggcaagtgaagcgcgggccgcggcgcgaccctccccggcggcgccgcgctccgaaccccggcccggcccccgccccgcccccgccccgcgcgccgctccggcgccccgcacccccgccaggcgcatgtctgcacctccgcttgccagaggccctcggtcagcgactggatgctcgccatcaaggtccagtggaagttcttcaagaggaaaggcgcccccgccccaggcttccgcgcccagcgctcgccacgctcagtgcccgttttaccaataaactgagcgaccccag

SEQ ID NO: 94 - DNA, 1791 bp, Homo sapiens
ggaggctgcagcagcggaagaccccagtccagatccaggactgagatcccagaaccatgaacctggccatcagcatcgctctcctgctaacagtcttgcaggtctcccgagggcagaaggtgaccagcctaacggcctgcctagtggaccagagccttcgtctggactgccgccatgagaataccagcagttcacccatccagtacgagttcagcctgacccgtgagacaaagaagcacgtgctctttggcactgtgggggtgcctgagcacacataccgctcccgaaccaacttcaccagcaaatacaacatgaaggtcctctacttatccgccttcactagcaaggacgagggcacctacacgtgtgcactccaccactctggccattccccacccatctcctcccagaacgtcacagtgctcagagacaaactggtcaagtgtgagggcatcagcctgctggctcagaacacctcgtggctgctgctgctcctgctctccctctccctcctccaggccacggatttcatgtccctgtgactggtggggcccatggaggagacaggaagcctcaagttccagtgcagagatcctacttctctgagtcagctgaccccctccccgcaatccctcaaaccttgaggagaagtggggaccccacccctcatcaggagttccagtgctgcatgcgattatctacccacgtccacgcggccacctcaccctctccgcacacctctggctgtctttttgtactttttgttccagagctgcttctgtctggtttatttaggttttatccttccttttctttgagagttcgtgaagagggaagccaggattggggacctgatggagagtgagagcatgtgaggggtagtgggatggtggggtaccagccactggaggggtcatccttgcccatcgggaccagaaacctgggagagacttggatgaggagtggttgggctgtgcctgggcctagcacggacatggtctgtcctgacagcactcctcggcaggcatggctggtgcctgaagaccccagatgtgagggcaccaccaagaatttgtggcctaccttgtgagggagagaactgagcatctccagcattctcagccacaaccaaaaaaaaataaaaagggcagccctccttaccactgtggaagtccctcagaggccttggggcatgacccagtgaagatgcaggtttgaccaggaaagcagcgctagtggagggttggagaaggaggtaaggatgagggttcatcatccctccctgcctaaggaagctaaaagcatggccctgctgcccctccctgcctccacccacagtggagagggctacaaaggaggacaagaccctctcaggctgtcccaagctcccaagagcttccagagctctgacccacagcctccaagtcaggtggggtggagtcccagagctgcacagggtttggcccaagtttctaagggaggcacttcctcccctcgcccatcagtgccagcccctgctggctggtgcctgagcccctcagacagccccctgccccgcaggcctgccttctcagggacttctgcggggcctgaggcaagccatggagtgagacccaggagccggacacttctcaggaaatggcttttcccaacccccagcccccacccggtggttcttcctgttctgtgactgtgtatagtgccaccacagcttatggcatctcattgaggacaaagaaaactgcacaataaaaccaagcctctggaatctaaaaaaaaaaaaaaaaaaaa

SEQ ID NO: 95 - DNA, 2367 bp, Homo sapiens
tctctccacaaactgcccaggagtgagtagctgctttcggtccgccggacacaccggacagatagacgtgcggacggcccaccaccccagcccgccaactagtcagcctgcgcctggcgcctcccctctccaggtccatccgccatgtggcccctgtggcgcctcgtgtctctgctggccctgagccaggccctgccctttgagcagagaggcttctgggacttcaccctggacgatgggccattcatgatgaacgatgaggaagcttcgggcgctgacacctcaggcgtcctggacccggactctgtcacacccacctacagcgccatgtgtcctttcggctgccactgccacctgcgggtggttcagtgctccgacctgggtctgaagtctgtgcccaaagagatctcccctgacaccacgctgctggacctgcagaacaacgacatctccgagctccgcaaggatgacttcaagggtctccagcacctctacgccctcgtcctggtgaacaacaagatctccaagatccatgagaaggccttcagcccactgcggaagctgcagaagctctacatctccaagaaccacctggtggagatcccgcccaacctacccagctccctggtggagctccgcatccacgacaaccgcatccgcaaggtgcccaagggagtgttcagcgggctccggaacatgaactgcatcgagatgggcgggaacccactggagaacagtggctttgaacctggagccttcgatggcctgaagctcaactacctgcgcatctcagaggccaagctgactggcatccccaaagacctccctgagaccctgaatgaactccacctagaccacaacaaaatccaggccatcgaactggaggacctgcttcgctactccaagctgtacaggctgggcctaggccacaaccagatcaggatgatcgagaacgggagcctgagcttcctgcccaccctccgggagctccacttggacaacaacaagttggccagggtgccctcagggctcccagacctcaagctcctccaggtggtctatctgcactccaacaacatcaccaaagtgggtgtcaacgacttctgtcccatgggcttcggggtgaagcgggcctactacaacggcatcagcctcttcaacaaccccgtgccctactgggaggtgcagccggccactttccgctgcgtcactgaccgcctggccatccagtttggcaactacaaaaagtagaggcagctgcagccaccgcggggcctcagtgggggtctctggggaacacagccagacatcctgatggggaggcagagccaggaagctaagccagggcccagctgcgtccaacccagccccccacctcgggtccctgaccccagctcgatgccccatcaccgcctctccctggctcccaagggtgcaggtgggcgcaaggcccggcccccatcacatgttcccttggcctcagagctgcccctgctctcccaccacagccacccagaggcaccccatgaagcttttttctcgttcactcccaaacccaagtgtccaaggctccagtcctaggagaacagtccctgggtcagcagccaggaggcggtccataagaatggggacagtgggctctgccagggctgccgcacctgtccagacacacatgttctgttcctcctcctcatgcatttccagcctttcaaccctccccgactctgcggctcccctcagcccccttgcaagttcatggcctgtccctcccagacccctgctccactggcccttcgaccagtcctcccttctgttctctctttccccgtccttcctctctctctctctctctctctgtgtgtgtgtgtgtgtgtgtgtgtgtgtgtgtgtgtgtgtgtgtgtgtgtcttgtgcttcctcagacctttctcgcttctgagcttggtggcctgttccctccatctctccgaacctggcttcgcctgtccctttcactccacaccctctggccttctgccttgagctgggactgctttctgtctgtccggcctgcacccagcccctgcccacaaaaccccagggacagcggtctccccagcctgccctgctcaggccttgcccccaaacctgtactgtcccggaggaggttgggaggtggaggcccagcatcccgcgcagatgacaccatcaaccgccagagtcccagacaccggttttcctagaagcccctcacccccactggcccactggtggctaggtctccccttatccttctggtccagcgcaaggaggggctgcttctgaggtcggtggctgtctttccattaaagaaacaccgtgcaacgtgaaaaaaaaaaaaaaaaaaaaa

SEQ ID NO: 96 - DNA, 5489 bp, Homo sapiens
ggctgagttttatgacgggcccggtgctgaagggcagggaacaacttgatggtgctactttgaactgcttttcttttctcctttttgcacaaagagtctcatgtctgatatttagacatgatgagctttgtgcaaaaggggagctggctacttctcgctctgcttcatcccactattattttggcacaacaggaagctgttgaaggaggatgttcccatcttggtcagtcctatgcggatagagatgtctggaagccagaaccatgccaaatatgtgtctgtgactcaggatccgttctctgcgatgacataatatgtgacgatcaagaattagactgccccaacccagaaattccatttggagaatgttgtgcagtttgcccacagcctccaactgctcctactcgccctcctaatggtcaaggacctcaaggccccaagggagatccaggccctcctggtattcctgggagaaatggtgaccctggtattccaggacaaccagggtcccctggttctcctggcccccctggaatctgtgaatcatgccctactggtcctcagaactattctccccagtatgattcatatgatgtcaagtctggagtagcagtaggaggactcgcaggctatcctggaccagctggccccccaggccctcccggtccccctggtacatctggtcatcctggttcccctggatctccaggataccaaggaccccctggtgaacctgggcaagctggtccttcaggccctccaggacctcctggtgctataggtccatctggtcctgctggaaaagatggagaatcaggtagacccggacgacctggagagcgaggattgcctggacctccaggtatcaaaggtccagctgggatacctggattccctggtatgaaaggacacagaggcttcgatggacgaaatggagaaaagggtgaaacaggtgctcctggattaaagggtgaaaatggtcttccaggcgaaaatggagctcctggacccatgggtccaagaggggctcctggtgagcgaggacggccaggacttcctggggctgcaggtgctcggggtaatgacggtgctcgaggcagtgatggtcaaccaggccctcctggtcctcctggaactgccggattccctggatcccctggtgctaagggtgaagttggacctgcagggtctcctggttcaaatggtgcccctggacaaagaggagaacctggacctcagggacacgctggtgctcaaggtcctcctggccctcctgggattaatggtagtcctggtggtaaaggcgaaatgggtcccgctggcattcctggagctcctggactgatgggagcccggggtcctccaggaccagccggtgctaatggtgctcctggactgcgaggtggtgcaggtgagcctggtaagaatggtgccaaaggagagcccggaccacgtggtgaacgcggtgaggctggtattccaggtgttccaggagctaaaggcgaagatggcaaggatggatcacctggagaacctggtgcaaatgggcttccaggagctgcaggagaaaggggtgcccctgggttccgaggacctgctggaccaaatggcatcccaggagaaaagggtcctgctggagagcgtggtgctccaggccctgcagggcccagaggagctgctggagaacctggcagagatggcgtccctggaggtccaggaatgaggggcatgcccggaagtccaggaggaccaggaagtgatgggaaaccagggcctcccggaagtcaaggagaaagtggtcgaccaggtcctcctgggccatctggtccccgaggtcagcctggtgtcatgggcttccccggtcctaaaggaaatgatggtgctcctggtaagaatggagaacgaggtggccctggaggacctggccctcagggtcctcctggaaagaatggtgaaactggacctcaaggacccccagggcctactgggcctggtggtgacaaaggagacacaggaccccctggtccacaaggattacaaggcttgcctggtacaggtggtcctccaggagaaaatggaaaacctggggaaccaggtccaaagggtgatgccggtgcacctggagctccaggaggcaagggtgatgctggtgcccctggtgaacgtggacctcctggattggcaggggccccaggacttagaggtggagctggtccccctggtcccgaaggaggaaagggtgctgctggtcctcctgggccacctggtgctgctggtactcctggtctgcaaggaatgcctggagaaagaggaggtcttggaagtcctggtccaaagggtgacaagggtgaaccaggcggcccaggtgctgatggtgtcccagggaaagatggcccaaggggtcctactggtcctattggtcctcctggcccagctggccagcctggagataagggtgaaggtggtgcccccggacttccaggtatagctggacctcgtggtagccctggtgagagaggtgaaactggccctccaggacctgctggtttccctggtgctcctggacagaatggtgaacctggtggtaaaggagaaagaggggctccgggtgagaaaggtgaaggaggccctcctggagttgcaggaccccctggaggttctggacctgctggtcctcctggtccccaaggtgtcaaaggtgaacgtggcagtcctggtggacctggtgctgctggcttccctggtgctcgtggtcttcctggtcctcctggtagtaatggtaacccaggacccccaggtcccagcggttctccaggcaaggatgggcccccaggtcctgcgggtaacactggtgctcctggcagccctggagtgtctggaccaaaaggtgatgctggccaaccaggagagaagggatcgcctggtgcccagggcccaccaggagctccaggcccacttgggattgctgggatcactggagcacggggtcttgcaggaccaccaggcatgccaggtcctaggggaagccctggccctcagggtgtcaagggtgaaagtgggaaaccaggagctaacggtctcagtggagaacgtggtccccctggaccccagggtcttcctggtctggctggtacagctggtgaacctggaagagatggaaaccctggatcagatggtcttccaggccgagatggatctcctggtggcaagggtgatcgtggtgaaaatggctctcctggtgcccctggcgctcctggtcatccaggcccacctggtcctgtcggtccagctggaaagagtggtgacagaggagaaagtggccctgctggccctgctggtgctcccggtcctgctggttcccgaggtgctcctggtcctcaaggcccacgtggtgacaaaggtgaaacaggtgaacgtggagctgctggcatcaaaggacatcgaggattccctggtaatccaggtgccccaggttctccaggccctgctggtcagcagggtgcaatcggcagtccaggacctgcaggccccagaggacctgttggacccagtggacctcctggcaaagatggaaccagtggacatccaggtcccattggaccaccagggcctcgaggtaacagaggtgaaagaggatctgagggctccccaggccacccagggcaaccaggccctcctggacctcctggtgcccctggtccttgctgtggtggtgttggagccgctgccattgctgggattggaggtgaaaaagctggcggttttgccccgtattatggagatgaaccaatggatttcaaaatcaacaccgatgagattatgacttcactcaagtctgttaatggacaaatagaaagcctcattagtcctgatggttctcgtaaaaaccccgctagaaactgcagagacctgaaattctgccatcctgaactcaagagtggagaatactgggttgaccctaaccaaggatgcaaattggatgctatcaaggtattctgtaatatggaaactggggaaacatgcataagtgccaatcctttgaatgttccacggaaacactggtggacagattctagtgctgagaagaaacacgtttggtttggagagtccatggatggtggttttcagtttagctacggcaatcctgaacttcctgaagatgtccttgatgtgcagctggcattccttcgacttctctccagccgagcttcccagaacatcacatatcactgcaaaaatagcattgcatacatggatcaggccagtggaaatgtaaagaaggccctgaagctgatggggtcaaatgaaggtgaattcaaggctgaaggaaatagcaaattcacctacacagttctggaggatggttgcacgaaacacactggggaatggagcaaaacagtctttgaatatcgaacacgcaaggctgtgagactacctattgtagatattgcaccctatgacattggtggtcctgatcaagaatttggtgtggacgttggccctgtttgctttttataaaccaaactctatctgaaatcccaacaaaaaaaatttaactccatatgtgttcctcttgttctaatcttgtcaaccagtgcaagtgaccgacaaaattccagttatttatttccaaaatgtttggaaacagtataatttgacaaagaaaaatgatacttctctttttttgctgttccaccaaatacaattcaaatgctttttgttttatttttttaccaattccaatttcaaaatgtctcaatggtgctataataaataaacttcaacactctttatgataacaacactgtgttatattctttgaatcctagcccatctgcagagcaatgactgtgctcaccagtaaaagataacctttctttctgaaatagtcaaatacgaaattagaaaagccctccctattttaactacctcaactggtcagaaacacagattgtattctatgagtcccagaagatgaaaaaaattttatacgttgataaaacttataaatttcattgattaatctcctggaagattggtttaaaaagaaaagtgtaatgcaagaatttaaagaaatatttttaaagccacaattattttaatattggatatcaactgcttgtaaaggtgctcctcttttttcttgtcattgctggtcaagattactaatatttgggaaggctttaaagacgcatgttatggtgctaatgtactttcacttttaaactctagatcagaattgttgacttgcattcagaacataaatgcacaaaatctgtacatgtctcccatcagaaagattcattggcatgccacagggattctcctccttcatcctgtaaaggtcaacaataaaaaccaaattatggggctgcttttgtcacactagcatagagaatgtgttgaaatttaactttgtaagcttgtatgtggttgttgatcttttttttccttacagacacccataataaaatatcatattaaaattc

SEQ ID NO: 97 - DNA, 2386 bp, Homo sapiens
tgcacgaagacgctgtcgggagagcccaggattcaacacgggccttgagaaatgtggctcttgtacctcctggtgccggccctgttctgcagggcaggaggctccattcccatccctcagaagttatttggggaggtgacttcccctctgttccccaagccttaccccaacaactttgaaacaaccactgtgatcacagtccccacgggatacagggtgaagctcgtcttccagcagtttgacctggagccttctgaaggctgcttctatgattatgtcaagatctctgctgataagaaaagcctggggaggttctgtgggcaactgggttctccactgggcaaccccccgggaaagaaggaatttatgtcccaagggaacaagatgctgctgaccttccacacagacttctccaacgaggagaatgggaccatcatgttctacaagggcttcctggcctactaccaagctgtggaccttgatgaatgtgcttcccggagcaaattaggggaggaggatccccagccccagtgccagcacctgtgtcacaactacgttggaggctacttctgttcctgccgtccaggctatgagcttcaggaagacaggcattcctgccaggctgagtgcagcagcgagctgtacacggaggcatcaggctacatctccagcctggagtaccctcggtcctacccccctgacctgcgctgcaactacagcatccgggtggagcggggcctcaccctgcacctcaagttcctggagccttttgatattgatgaccaccagcaagtacactgcccctatgaccagctacagatctatgccaacgggaagaacattggcgagttctgtgggaagcaaaggccccccgacctcgacaccagcagcaatgctgtggatctgctgttcttcacagatgagtcgggggacagccggggctggaagctgcgctacaccaccgagatcatcaagtgcccccagcccaagaccctagacgagttcaccatcatccagaacctgcagcctcagtaccagttccgtgactacttcattgctacctgcaagcaaggctaccagctcatagaggggaaccaggtgctgcattccttcacagctgtctgccaggatgatggcacgtggcatcgtgccatgcccagatgcaagatcaaggactgtgggcagccccgaaacctgcctaatggtgacttccgttacaccaccacaatgggagtgaacacctacaaggcccgtatccagtactactgccatgagccatattacaagatgcagaccagagctggcagcagggagtctgagcaaggggtgtacacctgcacagcacagggcatttggaagaatgaacagaagggagagaagattcctcggtgcttgccagtgtgtgggaagcccgtgaaccccgtggaacagaggcagcgcatcatcggagggcaaaaagccaagatgggcaacttcccctggcaggtgttcaccaacatccacgggcgcgggggcggggccctgctgggcgaccgctggatcctcacagctgcccacaccctgtatcccaaggaacacgaagcgcaaagcaacgcctctttggatgtgttcctgggccacacaaatgtggaagagctcatgaagctaggaaatcaccccatccgcagggtcagcgtccacccggactaccgtcaggatgagtcctacaattttgagggggacatcgccctgctggagctggaaaatagtgtcaccctgggtcccaacctcctccccatctgcctccctgacaacgataccttctacgacctgggcttgatgggctatgtcagtggcttcggggtcatggaggagaagattgctcatgacctcaggtttgtccgtctgcccgtagctaatccacaggcctgtgagaactggctccggggaaagaataggatggatgtgttctctcaaaacatgttctgtgctggacacccatctctaaagcaggacgcctgccagggggatagtgggggcgtttttgcagtaagggacccgaacactgatcgctgggtggccacgggcatcgtgtcctggggcatcgggtgcagcaggggctatggcttctacaccaaagtgctcaactacgtggactggatcaagaaagagatggaggaggaggactgagcccagaattcactaggttcgaatccagagagcagtgtggaaaaaaaaaaacaaaaaacaactgaccagttgttgataaccactaagagtctctattaaaattactgatgcagaaagaccgtgtgtgaaattctctttcctgtagtcccattgatgtactttacctgaaacaaccaaagggcccctttctttcttctgaggattgcagaggatatag

SEQ ID NO: 98 - DNA, 2248 bp, Homo sapiens
aacaatgtgccacgtcttctaagaagggggagtcctgaacttgtctgaagcccttgtccgtaagccttgaactacgttcttaaatctatgaagtcgagggacctttcgctgcttttgtagggacttctttccttgcttcagcaacatgaggcttttcttgtggaacgcggtcttgactctgttcgtcacttctttgattggggctttgatccctgaaccagaagtgaaaattgaagttctccagaagccattcatctgccatcgcaagaccaaaggaggggatttgatgttggtccactatgaaggctacttagaaaaggacggctccttatttcactccactcacaaacataacaatggtcagcccatttggtttaccctgggcatcctggaggctctcaaaggttgggaccagggcttgaaaggaatgtgtgtaggagagaagagaaagctcatcattcctcctgctctgggctatggaaaagaaggaaaaggtaaaattcccccagaaagtacactgatatttaatattgatctcctggagattcgaaatggaccaagatcccatgaatcattccaagaaatggatcttaatgatgactggaaactctctaaagatgaggttaaagcatatttaaagaaggagtttgaaaaacatggtgcggtggtgaatgaaagtcatcatgatgctttggtggaggatatttttgataaagaagatgaagacaaagatgggtttatatctgccagagaatttacatataaacacgatgagttatagagatacatctacccttttaatatagcactcatctttcaagagagggcagtcatctttaaagaacattttatttttatacaatgttctttcttgctttgttttttatttttatatattttttctgactcctatttaaagaaccccttaggtttctaagtacccatttctttctgataagttattgggaagaaaaagctaattggtctttgaatagaagacttctggacaatttttcactttcacagatatgaagctttgttttactttctcacttataaatttaaaatgttgcaactgggaatataccacgacatgagaccaggttatagcacaaattagcaccctatatttctgcttccctctattttctccaagttagaggtcaacatttgaaaagccttttgcaatagcccaaggcttgctattttcatgttataatgaaatagtttatgtgtaactggctctgagtctctgcttgaggaccagaggaaaatggttgttggacctgacttgttaatggctactgctttactaaggagatgtgcaatgctgaagttagaaacaaggttaatagccaggcatggtggctcatgcctgtaatcccagcactttgggaggctgaggcgggcggatcacctgaggttgggagttcgagaccagcctgaccaacacggagaaaccctatctctactaaaaatacaaaagtagccgggcgtggtgatgcgtgcctgtaatcccagctacccaggaaggctgaggcggcagaatcacttgaacccggaggcggaggttgcggtaagccgagatcacctccagcctggacactctgtctcgaaaaaaagaaaagaaacacggttaataacatataaatatgtatgcattgagacatgctacctaggacttaagctgatgaagcttggctcctagtgattggtggcctattatgataaataggacaaatcatttatgtgtgagtttctttgtaataaaatgtatcaatatgttatagatgaggtagaaagttatatttatattcaatatttacttcttaaggctagcggaatatccttcctggttctttaatgggtagtctatagtatattatactacaataacattgtatcataagataaagtagtaaaccagtctacattttcccatttctgtctcatcaaaaactgaagttagctgggtgtggtggctcatgcctgtaatcccagcactttgggggccaaggagggtggatcacttgagatcaggagttcaagaccagcctggccaacatggtgaaaccttgtctctactaaaaatacaaaaattagccaggcgtggtggtgcacacctgtagtcccagctactcgggaggctgagacaggagatttgcttgaacccgggaggcggaggttgcagtgagccaagattgtgccactgcactccagcctgggtgacagagcaagactccatctc

SEQ ID NO: 99 - protein, 688 aa, Homo sapiens
MWCIVLFSLLAWVYAEPTMYGEILSPNYPQAYPSEVEKSWDIEVPEGYGIHLYFTHLDIELSENCAYDSVQIISGDTEEGRLCGQRSSNNPHSPIVEEFQVPYNKLQVIFKSDFSNEERFTGFAAYYVATDINECTDFVDVPCSHFCNNFIGGYFCSCPPEYFLHDDMKNCGVNCSGDVFTALIGEIASPNYPKPYPENSRCEYQIRLEKGFQVVVTLRREDFDVEAADSAGNCLDSLVFVAGDRQFGPYCGHGFPGPLNIETKSNALDIIFQTDLTGQKKGWKLRYHGDPMPCPKEDTPNSVWEPAKAKYVFRDVVQITCLDGFEVVEGRVGATSFYSTCQSNGKWSNSKLKCQPVDCGIPESIENGKVEDPESTLFGSVIRYTCEEPYYYMENGGGGEYHCAGNGSWVNEVLGPELPKCVPVCGVPREPFEEKQRIIGGSDADIKNFPWQVFFDNPWAGGALINEYWVLTAAHVVEGNREPTMYVGSTSVQTSRLAKSKMLTPEHVFIHPGWKLLEVPEGRTNFDNDIALVRLKDPVKMGPTVSPICLPGTSSDYNLMDGDLGLISGWGRTEKRDRAVRLKAARLPVAPLRKCKEVKVEKPTADAEAYVFTPNMICAGGEKGMDSCKGDSGGAFAVQDPNDKTKFYAAGLVSWGPQCGTYGLYTRVKNYVDWIMKTMQENSTPRED

SEQ ID NO: 100 - DNA, 4170 bp, Homo sapiens
cgcgggtctgtggagagccgggtgcgagcggcggcagcacgaggggaaaagagctgagcggagaccaaagtcagccgggagacagtgggtctgtgagagaccgaatagaggggctggggccacgagcgccattgacaagcaatggggaagaaacagaaaaacaagagcgaagacagcaccaaggatgacattgatcttgatgccttggctgcagaaatagaaggagctggtgctgccaaagaacaggagcctcaaaagtcaaaagggaaaaagaaaaaagagaaaaaaaagcaggactttgatgaagatgatatcctgaaagaactggaagaattgtctttggaagctcaaggcatcaaagctgacagagaaactgttgcagtgaagccaacagaaaacaatgaagaggaattcacctcaaaagataaaaaaaagaaaggacagaagggcaaaaaacagagttttgatgataatgatagcgaagaattggaagataaagattcaaaatcaaaaaagactgcaaaaccgaaagtggaaatgtactctgggagtgatgatgatgatgattttaacaaacttcctaaaaaagctaaagggaaagctcaaaaatcaaataagaagtgggatgggtcagaggaggatgaggataacagtaaaaaaattaaagagcgttcaagaataaattcttctggtgaaagtggtgatgaatcagatgaatttttgcaatctagaaaaggacagaaaaaaaatcagaaaaacaagccaggtcctaacatagaaagtgggaatgaagatgatgacgcctccttcaaaattaagacagtggcccaaaagaaggcagaaaagaaggagcgcgagagaaaaaagcgagatgaagaaaaagcgaaactgcggaagctgaaagaaaaagaagagttagaaacaggtaaaaaggatcagagtaaacaaaaggaatctcaaaggaaatttgaagaagaaactgtaaaatccaaagtgactgttgatactggagtaattcctgcctctgaagagaaagcagagactcccacagctgcagaagatgacaatgaaggagacaaaaagaagaaagataagaagaaaaagaaaggagaaaaggaagaaaaagagaaagagaagaaaaaaggacctagcaaagccactgttaaagctatgcaagaagctctggctaagcttaaagaggaagaagaaagacagaagagagaagaggaagaacgtataaaacggcttgaagaattagaagccaagcgtaaagaagaggaacgattggaacaagaaaaaagagaaaggaaaaagcaaaaagaaaaagaaagaaaagaacgcttgaaaaaagaagggaaacttttaactaaatcccagagagaagccagagccagagccgaagctactcttaaactgctacaagctcagggtgttgaagtgccatcaaaagactctttgccaaagaagaggccaatttatgaagataaaaagaggaaaaaaataccacagcagctagaaagtaaagaagtgtctgaatcaatggaattatgtgctgctgtagaagttatggaacaaggagtaccagaaaaggaagagacaccacctcctgttgaaccagaagaagaagaagatactgaggatgctggattggatgattgggaagctatggccagtgatgaggagacagaaaaagtagaaggaaacacagttcatatagaagtaaaagaaaaccctgaagaggaggaggaggaggaagaagaggaagaagaagatgaagaaagtgaagaagaggaggaagaggagggagaaagtgaaggcagtgaaggtgatgaggaagatgaaaaggtgtcagatgagaaggattcagggaagacattagataaaaagccaagtaaagaaatgagctcagattctgaatatgactctgatgatgatcggactaaagaagaaagggcttatgacaaagcaaaacggaggattgagaaacggcgacttgaacatagtaaaaatgtaaacaccgaaaagctaagagcccctattatctgcgtacttgggcatgtggacacagggaagacaaaaattctagataagctccgtcacacacatgtacaagacggtgaagcaggtggtatcacacaacaaatttgggccaccaatgttcctcttgaagctattaatgaacagactaagatgattaaaaattttgatagagagaatgtacggattccaggaatgctaattattgatactcctgggcatgaatctttcagtaatctgagaaatagaggaagctctctttgtgacattgccattttagttgttgatattatgcatggtttggagccccagacaattgagtctatcaaccttctcaaatctaaaaaatgtcccttcattgttgcactcaataagattgataggttatatgattggaaaaagagtcctgactctgatgtggctgctactttaaagaagcagaaaaagaatacaaaagatgaatttgaggagcgagcaaaggctattattgtagaatttgcacagcagggtttgaatgctgctttgttttatgagaataaagatccccgcacttttgtgtctttggtacctacctctgcacatactggtgatggcatgggaagtctgatctaccttcttgtagagttaactcagaccatgttgagcaagagacttgcacactgtgaagagctgagagcacaggtgatggaggttaaagctctcccggggatgggcaccactatagatgtcattttgatcaatgggcgtttgaaggaaggagatacaatcattgttcctggagtagaagggcccattgtaactcagattcgaggcctcctgttacctcctcctatgaaggaattacgagtgaagaaccagtatgaaaagcataaagaagtagaagcagctcagggggtaaagattcttggaaaagacctggagaaaacattggctggtttacccctccttgtggcttataaagaagatgaaatccctgttcttaaagatgaattgatccatgagttaaagcagacactaaatgctatcaaattagaagaaaaaggagtctatgtccaggcatctacactgggttctttggaagctctactggaatttctgaaaacatcagaagtgccctatgcaggaattaacattggcccagtgcataaaaaagatgttatgaaggcttcagtgatgttggaacatgaccctcagtatgcagtaattttggccttcgatgtgagaattgaacgagatgcacaagaaatggctgatagtttaggagttagaatttttagtgcagaaattatttatcatttatttgatgcctttacaaaatatagacaagactacaagaaacagaaacaagaagaatttaagcacatagcagtatttccctgcaagataaaaatcctccctcagtacatttttaattctcgagatccgatagtgatgggggtgacggtggaagcaggtcaggtgaaacaggggacacccatgtgtgtcccaagcaaaaattttgttgacatcggaatagtaacaagtattgaaataaaccataaacaagtggatgttgcaaaaaaaggacaagaagtttgtgtaaaaatagaacctatccctggtgagtcacccaaaatgtttggaagacattttgaagctacagatattcttgttagtaagatcagccggcagtccattgatgcactcaaagactggttcagagatgaaatgcagaagagtgactggcagcttattgtggagctgaagaaagtatttgaaatcatctaattttttcacatggagcaggaactggagtaaatgcaatactgtgttgtaatatcccaacaaaaatcagacaaaaaatggaacagacgtatttggacactgatggacttaagtatggaaggaagaaaaataggtgtataaaatgttttccatgagaaaccaagaaacttacactggtttgacagtggtcagttacatgtccccacagttccaatgtgcctgttcactcacctctcccttccccaacccttctctacttggctgctgttttaaagtttgcccttccccaaatttggatttttattacagagtctaaagctctttcgattttatactgattaaatcagtactgcagtatttgattaacca

SEQ ID NO: 101 - protein, 366 aa, Homo sapiens
MRVMAPRTLILLLSGALALTETWACSHSMRYFDTAVSRPGRGEPRFISVGYVDDTQFVRFDSDAASPRGEPRAPWVEQEGPEYWDRETQKYKRQAQADRVNLRKLRGYYNQSEDGSHTLQWMYGCDLGPDGRLLRGYDQSAYDGKDYIALNEDLRSWTAADTAAQITQRKWEAAREAEQWRAYLEGTCVEWLRRYLENGKETLQRAEHPKTHVTHHPVSDHEATLRCWALGFYPAEITLTWQRDGEDQTQDTELVETRPAGDGTFQKWAAVVVPSGEEQRYTCHVQHEGLPEPLTLRWEPSSQPTIPIVGIVAGLAVLAVLAVLGAVMAVVMCRRKSSGGKGGSCSQAASSNSAQGSDESLIACKA

SEQ ID NO: 102 - DNA, 7260 bp, Homo sapiens
tcactgtcactgctaaattcagagcagattagagcctgcgcaatggaataaagtcctcaaaattgaaatgtgacattgctctcaacatctcccatctctctggatttccttttgcttcattattcctgctaaccaattcattttcagactttgtacttcagaagcaatgggaaaaatcagcagtcttccaacccaattatttaagtgctgcttttgtgatttcttgaaggtgaagatgcacaccatgtcctcctcgcatctcttctacctggcgctgtgcctgctcaccttcaccagctctgccacggctggaccggagacgctctgcggggctgagctggtggatgctcttcagttcgtgtgtggagacaggggcttttatttcaacaagcccacagggtatggctccagcagtcggagggcgcctcagacaggcatcgtggatgagtgctgcttccggagctgtgatctaaggaggctggagatgtattgcgcacccctcaagcctgccaagtcagctcgctctgtccgtgcccagcgccacaccgacatgcccaagacccagaaggaagtacatttgaagaacgcaagtagagggagtgcaggaaacaagaactacaggatgtaggaagaccctcctgaggagtgaagagtgacatgccaccgcaggatcctttgctctgcacgagttacctgttaaactttggaacacctaccaaaaaataagtttgataacatttaaaagatgggcgtttcccccaatgaaatacacaagtaaacattccaacattgtctttaggagtgatttgcaccttgcaaaaatggtcctggagttggtagattgctgttgatcttttatcaataatgttctatagaaaagaaaaaaaaatatatatatatatatatcttagtccctgcctctcaagagccacaaatgcatgggtgttgtatagatccagttgcactaaattcctctctgaatcttggctgctggagccattcattcagcaaccttgtctaagtggtttatgaattgtttccttatttgcacttctttctacacaactcgggctgtttgttttacagtgtctgataatcttgttagtctatacccaccacctcccttcataacctttatatttgccgaatttggcctcctcaaaagcagcagcaagtcgtcaagaagcacaccaattctaacccacaagattccatctgtggcatttgtaccaaatataagttggatgcattttattttagacacaaagctttatttttccacatcatgcttacaaaaaagaataatgcaaatagttgcaactttgaggccaatcatttttaggcatatgttttaaacatagaaagtttcttcaactcaaaagagttccttcaaatgatgagttaatgtgcaacctaattagtaactttcctctttttattttttccatatagagcactatgtaaatttagcatatcaattatacaggatatatcaaacagtatgtaaaactctgttttttagtataatggtgctattttgtagtttgttatatgaaagagtctggccaaaacggtaatacgtgaaagcaaaacaataggggaagcctggagccaaagatgacacaaggggaagggtactgaaaacaccatccatttgggaaagaaggcaaagtccccccagttatgccttccaagaggaacttcagacacaaaagtccactgatgcaaattggactggcgagtccagagaggaaactgtggaatggaaaaagcagaaggctaggaattttagcagtcctggtttctttttctcatggaagaaatgaacatctgccagctgtgtcatggactcaccactgtgtgaccttgggcaagtcacttcacctctctgtgcctcagtttcctcatctgcaaaatgggggcaatatgtcatctacctacctcaaaggggtggtataaggtttaaaaagataaagattcagatttttttaccctgggttgctgtaagggtgcaacatcagggcgcttgagttgctgagatgcaaggaattctataaataacccattcatagcatagctagagattggtgaattgaatgctcctgacatctcagttcttgtcagtgaagctatccaaataactggccaactagttgttaaaagctaacagctcaatctcttaaaacacttttcaaaatatgtgggaagcatttgattttcaatttgattttgaattctgcatttggttttatgaatacaaagataagtgaaaagagagaaaggaaaagaaaaaggagaaaaacaaagagatttctaccagtgaaaggggaattaattactctttgttagcactcactgactcttctatgcagttactacatatctagtaaaaccttgtttaatactataaataatattctattcattttgaaaaacacaatgattccttcttttctaggcaatataaggaaagtgatccaaaatttgaaatattaaaataatatctaataaaaagtcacaaagttatcttctttaacaaactttactcttattcttagctgtatatacatttttttaaaaagtttgttaaaatatgcttgactagagtttcagttgaaaggcaaaaacttccatcacaacaagaaatttcccatgcctgctcagaagggtagcccctagctctctgtgaatgtgttttatccattcaactgaaaattggtatcaagaaagtccactggttagtgtactagtccatcatagcctagaaaatgatccctatctgcagatcaagattttctcattagaacaatgaattatccagcattcagatctttctagtcaccttagaactttttggttaaaagtacccaggcttgattatttcatgcaaattctatattttacattcttggaaagtctatatgaaaaacaaaaataacatcttcagtttttctcccactgggtcacctcaaggatcagaggccaggaaaaaaaaaaaagactccctggatctctgaatatatgcaaaaagaaggccccatttagtggagccagcaatcctgttcagtcaacaagtattttaactctcagtccaacattatttgaattgagcacctcaagcatgcttagcaatgttctaatcactatggacagatgtaaaagaaactatacatcatttttgccctctgcctgttttccagacatacaggttctgtggaataagatactggactcctcttcccaagatggcacttctttttatttcttgtccccagtgtgtaccttttaaaattattccctctcaacaaaactttataggcagtcttctgcagacttaacatgttttctgtcatagttagatgtgataattctaagagtgtctatgacttatttccttcacttaattctatccacagtcaaaaatcccccaaggaggaaagctgaaagatgcaactgccaatattatctttcttaactttttccaacacataatcctctccaactggattataaataaattgaaaataactcattataccaattcactattttattttttaatgaattaaaactagaaaacaaattgatgcaaaccctggaagtcagttgattactatatactacagcagaatgactcagatttcatagaaaggagcaaccaaaatgtcacaaccaaaactttacaagctttgcttcagaattagattgctttataattcttgaatgaggcaatttcaagatatttgtaaaagaacagtaaacattggtaagaatgagctttcaactcataggcttatttccaatttaattgaccatactggatacttaggtcaaatttctgttctctcttgcccaaataatattaaagtattatttgaactttttaagatgaggcagttcccctgaaaaagttaatgcagctctccatcagaatccactcttctagggatatgaaaatctcttaacacccaccctacatacacagacacacacacacacacacacacacacacacacacacacacattcaccctaaggatccaatggaatactgaaaagaaatcacttccttgaaaattttattaaaaaacaaacaaacaaacaaaaagcctgtccacccttgagaatccttcctctccttggaacgtcaatgtttgtgtagatgaaaccatctcatgctctgtggctccagggtttctgttactattttatgcacttgggagaaggcttagaataaaagatgtagcacattttgctttcccatttattgtttggccagctatgccaatgtggtgctattgtttctttaagaaagtacttgactaaaaaaaaaagaaaaaaagaaaaaaaagaaagcatagacatatttttttaaagtataaaaacaacaattctatagatagatggcttaataaaatagcattaggtctatctagccaccaccacctttcaactttttatcactcacaagtagtgtactgttcaccaaattgtgaatttgggggtgcaggggcaggagttggaaattttttaaagttagaaggctccattgttttgttggctctcaaacttagcaaaattagcaatatattatccaatcttctgaacttgatcaagagcatggagaataaacgcgggaaaaaagatcttataggcaaatagaagaatttaaaagataagtaagttccttattgatttttgtgcactctgctctaaaacagatattcagcaagtggagaaaataagaacaaagagaaaaaatacatagatttacctgcaaaaaatagcttctgccaaatcccccttgggtattctttggcatttactggtttatagaagacattctcccttcacccagacatctcaaagagcagtagctctcatgaaaagcaatcactgatctcatttgggaaatgttggaaagtatttccttatgagatgggggttatctactgataaagaaagaatttatgagaaattgttgaaagagatggctaacaatctgtgaagattttttgtttcttggttttgtttttttttttttttttactttatacagtctttatgaatttcttaatgttcaaaatgacttggttcttttcttcttttttttatatcagaatgaggaataataagttaaacccacatagactctttaaaactataggctagatagaaatgtatgtttgacttgttgaagctataatcagactatttaaaatgttttgctatttttaatcttaaaagattgtgctaatttattagagcagaacctgtttggctctcctcagaagaaagaatctttccattcaaatcacatggctttccaccaatattttcaaaagataaatctgatttatgcaatggcatcatttattttaaaacagaagaattgtgaaagtttatgcccctcccttgcaaagaccataaagtccagatctggtaggggggcaacaacaaaaggaaaatgttgttgattcttggttttggattttgttttgttttcaatgctagtgtttaatcctgtagtacatatttgcttattgctattttaatattttataagaccttcctgttaggtattagaaagtgatacatagatatcttttttgtgtaatttctatttaaaaaagagagaagactgtcagaagctttaagtgcatatggtacaggataaagatatcaatttaaataaccaattcctatctggaacaatgcttttgttttttaaagaaacctctcacagataagacagaggcccaggggatttttgaagctgtctttattctgcccccatcccaacccagcccttattattttagtatctgcctcagaattttatagagggctgaccaagctgaaactctagaattaaaggaacctcactgaaaacatatatttcacgtgttccctctcttttttttcctttttgtgagatggggtctcgcactgtcccccaggctggagtgcagtggcatgatctcggctcactgcaacctccacctcctgggtttaagcgattctcctgcctcagcctcctgagtagctgggattacaggcacccaccactatgcccggctaattttttggatttttaatagagacggggttttaccatgttggccaggttggactcaaactcctgaccttgtgatttgcccgcctcagcctcccaaattgctgggattacaggcatgagccaccacaccctgcccatgtgttccctcttaatgtatgattacatggatcttaaacatgatccttctctcctcattcttcaactatctttgatggggtctttcaaggggaaaaaaatccaagcttttttaaagtaaaaaaaaaaaaagagaggacacaaaaccaaatgttactgctcaactgaaatatgagttaagatggagacagagtttctcctaataaccggagctgaattacctttcactttcaaaaacatgaccttccacaatccttagaatctgcctttttttatattactgaggcctaaaagtaaacattactcattttattttgcccaaaatgcactgatgtaaagtaggaaaaataaaaacagagctctaaaatccctttcaagccacccattgaccccactcaccaactcatagcaaagtcacttctgttaatcccttaatctgattttgtttggatatttatcttgtacccgctgctaaacacactgcaggagggactctgaaacctcaagctgtctacttacatcttttatctgtgtctgtgtatcatgaaaatgtctattcaaaatatcaaaacctttcaaatatcacgcagcttatattcagtttacataaaggccccaaataccatgtcagatctttttggtaaaagagttaatgaactatgagaattgggattacatcatgtattttgcctcatgtatttttatcacacttataggccaagtgtgataaataaacttacagacactgaattaatttcccctgctactttgaaaccagaaaataatgactggccattcgttacatctgtcttagttgaaaagcatattttttattaaattaattctgattgtatttgaaattattattcaattcacttatggcagaggaatatcaatcctaatgacttctaaaaatgtaactaattgaatcattatcttacatttactgtttaataagcatattttgaaaatgtatggctagagtgtcataataaaatggtatatctttctttagtaattacaaaaaaaaaaaaaaaaaaaaaaaa

SEQ ID NO: 103 - DNA, 2060 bp, Homo sapiens
ctggcttcggcctcagccccaccatggtgacgcttgctgaactgctggtgctcctggccgctctcctggccacggtctcgggctatttcgttagcatcgacgcccatgctgaagagtgcttctttgagcgggtcacctcgggcaccaagatgggcctcatcttcgaggtggcggagggcggcttcctggacatcgacgtggagattacaggaccagataacaaaggaatttacaaaggagacagagaatccagtgggaaatacacatttgctgctcacatggatggaacatacaaattttgttttagtaaccggatgtccaccatgactccaaaaatagtgatgttcaccattgatattggggaggctccaaaaggacaagatatggaaacagaagctcaccagaacaagctagaagaaatgatcaatgagctagcagtggcgatgacagctgtaaagcacgaacaggaatacatggaagtccgggagagaatacacagagccatcaacgacaacacaaacagcagagtggtcctttggtccttctttgaagctcttgttctagttgccatgacattgggacagatctactacctgaagagattttttgaagtccggagagttgtttaaaaagcctcttcctgatgatcccaactcagaattcactgtttaccaaacaccttggtcataataatgtcattagtttctccatttttattttctgaactgtacattcacaacttatgtttctttgagattaatagatattgggggaaaaacgcctttttaggaaaattatagtgaaaatttgacagttgattggcataatttcttgtttgaatgctgcctccattatataggtccttccaggaactcaaacactgtaagtgaaatatgggagtatagtttttattatttcttcttttccttttgttttcataatataatgcagtttgttcaggaaatcagcacaaagcctgatagtactttactaaaatgactgcattctttggattccttcagtctatggttcaagtcactaaagattcatttttgttgagtccttatgagaaacagcagtatgaatcttgacggtttctgcccgtcctaatggcagagctctctgacttgggtgtatgctgccaggctgggtactttcatactttgttttcttgttttgctttaaaactacgactcagcatacattttcccacatacatttttacattgtaccttaggactcagtcatctccacttaaattgatgacacaagcagctaataaccatttctgggtttctgcctaaccccctaattgtctgttaaagccaattctctgggtgtcccagtgagtggtggctttttttctttccacattggcacattcacttctcccactcttggcatgtaagaaataagcatttacataattggaaaaatctggatttctgatgccaaagggttaaagcttcttggatttcatttcattgatatacagccactattttatttttgatcagtggcctttgggccactgttcagggtactgaccatcagtgtcagcattagggttttggtttttgtttcttttgggtatttcttttttggcacatgtgaatcttgttttgtgtaaaatgaaattactttctcttgttctctgatgatgggtttaaaattaaaagagcatccggttttggtatggggatgatccaggattatgttgtgactgatacatattagttacttgtgctttttttttttttttttggatctttgcaagggcaaaactacaagtaacgagttttatataattaatttaaatttgttacaggttttcatgttcaggataaaccatacttccaccttgggtgagaacacttgcaacagtttattaatgaggtgactttcaccttaggacaactgttgcatgccaagttttttgtgtgtgtgaaacacttcaaaactgatttaaaagatgtaaatttaaaattggttgtatctaatatgccccaggttcggtaaataaacaattctttttaaaaaaaaaaaaaaaaaaaaaaaaa

SEQ ID NO: 104 - DNA, 1369 bp, Homo sapiens
aagctccgggcagggctgggaaggaaaggaaataccaaaatatttgcagactggatccaaatcaggagcccagatgaacttaaagaagcgagcatgggattcttagtttttcaagatccgtacacacgaagcctttaatcagcatcaactccagtgtccgttttctctggttttgtgaagactgcacaaaactctcatgatggagaaccaaaggacttagttacctgtttcagtgtcatctaaagtcaactgaaaagtgaagcaggcagtaatacagccatggaaagaaattcaagtttatggaagaacctaatagatgaacacccagtctgcacaacctggaagcaagaggccgaaggagccatttatcatcttgccagtattttatttgtagtaggtttcatgggtggcagtggattcttcgggctcctttatgtcttcagtttgctggggttgggttttctctgttctgctgtctgggcttgggtagatgtctgtgcagctgacatattttcctggaattttgtactgtttgtcatctgcttcatgcaatttgttcatattgcatatcaagttcgcagcataacctttgcccgagaattccaagtgttgtacagctcccttttccagcccctggggatctctttgcctgtcttcagaacgattgctttgagctctgaagtggttactttggaaaaggaacactgttatgccatgcaggggaaaacttccattgataaactctccttgcttgtttcaggaaggatcagagtgacagttgatggcgaatttctgcattacattttcccccttcagttcctggattctcctgagtgggattcactgagacccacagaggaaggcatttttcaggtaaccctcactgcagaaactgattgtcgatatgtgtcttggaggagaaagaaattatatctgctctttgctcagcatcgctacatctcccgccttttttcagtgctaattggcagtgacattgcagataaactctatgccttgaatgacagggtatatataggaaaaagatatcactatgatattcggctacccaacttctatcaaatgtcaactccagaaatacgcagatcacccctgacacaacattttcagaattccagacgatactgtgataaatgacatcaaagtctgaaatttataagtataaaaaaagactctctcttcatcattccccagtgaaatagcaaaatacaaaaaaagagctccctaatgtttttataaatcaaattcagaagcgagatgccattgccaactgttttattcctttcaacaactgcattgtgaataaactttacaaatttttcttgtaaaaaaaaaaaaaaaaaaaaaaaaa

SEQ ID NO: 105 - DNA, 1501 bp, Homo sapiens
ggggtcggccgggtgctaggccggggccgaggccgaggccggggcgggatccagagcgggagccggcgcgggatctgggactcggagcgggatccggagcgggacccaggagccggcgcggggccatggcgaggcgcgggccagggtggcggccgcttctgctgctcgtgctgctggcgggcgcggcgcagggcggcctctacttccgccggggacagacctgctaccggcctctgcggggggacgggctggctccgctggggcgcagcacatacccccggcctcatgagtacctgtccccagcggatctgcccaagagctgggactggcgcaatgtggatggtgtcaactatgccagcatcacccggaaccagcacatcccccaatactgcggctcctgctgggcccacgccagcaccagcgctatggcggatcggatcaacatcaagaggaagggagcgtggccctccaccctcctgtccgtgcagaacgtcatcgactgcggtaacgctggctcctgtgaagggggtaatgacctgtccgtgtgggactacgcccaccagcacggcatccctgacgagacctgcaacaactaccaggccaaggaccaggagtgtgacaagtttaaccaatgtgggacatgcaatgaattcaaagagtgccacgccatccggaactacaccctctggagggtgggagactacggctccctctctgggagggagaagatgatggcagaaatctacgcaaatggtcccatcagctgtggaataatggcaacagaaagactggctaactacaccggaggcatctatgccgaataccaggacaccacatatataaaccatgtcgtttccgtggctgggtggggcatcagtgatgggactgagtactggattgtccggaattcatggggtgaaccatggggcgagagaggctggctgaggatcgtgaccagcacctataaggatgggaagggcgccagatacaaccttgccatcgaggagcactgtacatttggggaccccatcgtttaaggccatgtcactagaagcgcagtttaagaaaaggcatggtgacccatgaccagaggggatcctatggttatgtgtgccaggctggctggcaggaactggggtggctatcaatattggatggcgaggacagcgtggtactggctgcgagtgttcctgagagttgaaagtgggatgacttatgacacttgcacagcatggctctgcctcacaatgatgcagtcagccacctggtgaagaagtgacctgcaacacaggaaacgatgggacctcagtcttcttcagcagaggacttgatattttgtatttggcaactgtgggcaataatatggcatttaagaggtgaaagagttcagacttatcaccattcttatgtcactttagaatcaagggtgggggagggagggagggagttggcagtttcaaatcgcccaagtgatgaataaagtatctggctctgcacgaga

SEQ ID NO: 106 - DNA, 1594 bp, Homo sapiens
gcccgccggtccacgccgcgcaccgctccgagggccagcgccacccgctccgcagccggcaccatgcgcgagatcgtgcacatccaggcgggccagtgcggcaaccagatcggcgccaagttttgggaggtcatcagcgatgagcatgggatcgaccccacaggcagttaccatggagacagtgacttgcagctggagagaatcaacgtgtactacaatgaggctgctggtaacaaatatgtacctcgggccatcctggtggatctggagcctggcaccatggactctgtcaggtctggacccttcggccagatcttcagaccagacaacttcgtgttcggccagagtggagccgggaataactgggccaagggccactacacagagggagccgagctggtcgactcggtcctggatgtggtgaggaaggagtcagagagctgtgactgtctccagggcttccagctgacccactctctggggggcggcacggggtccgggatgggcaccctgctcatcagcaagatccgggaagagtacccagaccgcatcatgaacaccttcagcgtcatgccctcacccaaggtgtcagacacggtggtggagccctacaacgccaccctctcggtccaccagctggtggaaaacacagatgaaacctactccattgataacgaggccctgtatgacatctgcttccgcaccctgaagctgaccacccccacctacggggacctcaaccacctggtgtcggccaccatgagcggggtcaccacctgcctgcgcttcccgggccagctgaacgcagacctgcgcaagctggcggtgaacatggtgcccttccctcgcctgcacttcttcatgcccggcttcgcgcccctgaccagccggggcagccagcagtaccgggcgctcacggtgcccgagctcacccagcagatgttcgactccaagaacatgatggccgcctgcgacccgcgccacggccgctacctgacggtggctgccatcttccggggccgcatgtccatgaaggaggtggacgagcagatgctcaacgtgcagaacaagaacagcagctacttcgtggagtggatccccaacaacgtgaagacggccgtgtgcgacatcccgccccgcggcctgaagatgtcggccaccttcatcggcaacagcacggccatccaggagctgttcaagcgcatctccgagcagttcacggccatgttccggcgcaaggccttcctgcactggtacacgggcgagggcatggacgagatggagttcaccgaggccgagagcaacatgaacgacctggtgtccgagtaccagcagtaccaggacgccacggccgacgaacaaggggagttcgaggaggaggagggcgaggacgaggcttaaaaacttctcagatcaatcgtgcatccttagtgaacttctgttgtcctcaagcatggtctttctacttgtaaactatggtgctcagttttgcctctgttagaaattcacactgttgatgtaatgatgtggaactcctctaaaaattacagtattgtctgtgaaggtatctatactaataaaaaagcatgtgtag

SEQ ID NO: 107 - DNA, 8187 bp, Homo sapiens
cccgagaagcggcggggcggcgggccggcgggcggggcgcagagccaggcagcgcaggtatagccaggctggagaaaagaagctgccaccatggttgcactttcactgaagatcagcattgggaatgtggtgaagacgatgcagtttgagccgtctaccatggtgtacgacgcctgccgcatcattcgtgagcggatcccagaggccccagctggtcctcccagcgactttgggctctttctgtcagatgatgaccccaaaaagggtatatggctggaggctgggaaagctttggactactacatgctccgaaatggggacactatggagtacaggaagaaacagagacccctgaagatccgtatgctggatggaactgtgaagacgatcatggtggatgactctaagactgtcactgacatgctcatgaccatctgtgcccgcattggcatcaccaatcatgatgaatattcattggttcgagagctgatggaagagaaaaaggaggaaataacagggaccttaagaaaggacaagacattgctgcgagatgaaaagaagatggagaaactaaagcagaaattgcacacagatgatgagttgaactggctggaccatggtcggacactgagggagcagggtgtagaggagcacgagacgctgctgctgcggaggaagttcttttactcagaccagaatgtggattcccgggaccctgtacagctgaacctcctgtatgtgcaggcacgagatgacatcctgaatggctcccaccctgtctcctttgacaaggcctgtgagtttgctggcttccaatgccagatccagtttgggccccacaatgagcagaagcacaaggctggcttccttgacctgaaggacttcctgcccaaggagtatgtgaagcagaagggagagcgtaagatcttccaggcacacaagaattgtgggcagatgagtgagattgaggccaaggtccgctacgtgaagctagcccgttctctcaagacttacggtgtctccttcttcctggtgaaggaaaaaatgaaagggaagaacaagctagtgcccaggcttctgggcatcaccaaggagtgtgtgatgcgagtggatgagaagaccaaggaagtgatccaggagtggaacctcaccaacatcaaacgctgggctgcgtctcccaaaagcttcaccctggattttggagattaccaagatggctattactcagtacagacaactgaaggggagcagattgcacagctcattgccggctacatcgatatcatcctgaagaagaaaaaaagcaaggatcactttgggctggaaggagatgaggagtctactatgctggaggactcagtgtcccccaaaaagtcaacagtcctgcagcagcaatacaaccgggtggggaaagtggagcatggctctgtggccctgcctgccatcatgcgctctggagcctctggtcctgagaatttccaggtgggcagcatgccccctgcccagcagcagattaccagcggccagatgcaccgaggacacatgcctcctctgacttcagcccagcaggcactcactggaaccattaactccagcatgcaggccgtgcaggctgcccaggccaccctggatgactttgacactctgccgcctcttggccaggatgctgcctctaaggcctggcgtaaaaacaagatggatgaatcaaagcatgagatccactctcaggtagatgccatcacagctggtactgcgtctgtggtgaacctgacagcaggggaccctgctgagacagactataccgcagtgggctgtgcagtcaccacaatctcctccaacctgacggagatgtcccgtggggtgaagctgctggctgccttgctggaggacgaaggcggcagtggtcggcccctgttgcaggcagcaaagggccttgcgggagcagtgtcagaactgctgcgcagtgcccaaccagccagtgctgagccccgtcagaacctgctgcaagcagctgggaacgtgggccaggccagtggggagctgttgcaacaaattggggaaagtgatactgacccccacttccaggatgcgctaatgcagctcgccaaagctgtggcaagtgctgcagctgccctggtcctcaaggccaagagtgtggcccagcggacagaggactcgggacttcagacccaagttattgctgcagcaacacagtgtgccctatccacttcccaactagtggcctgtactaaggtggtggcacctacaatcagctcacctgtctgccaagagcaactggtggaggctggacgactggtagccaaagccgtggagggctgtgtgtctgcctcccaggcagctacagaggatgggcaactgttgcgaggggtaggagcagcagccacagctgtcacccaggccctaaatgagctgctgcagcatgtgaaagcccatgccacaggggctgggcctgctggccgttatgaccaggctactgacaccatcctaaccgtcactgagaacatctttagctccatgggtgatgctggggagatggtgggacaggcccgcatcctggcccaagccacatctgacctggtcaatgccatcaaggctgatgctgagggggaaagtgatctggagaactcccgcaagctcttaagtgctgccaagatcctagctgatgccacagccaagatggtagaggctgccaagggagcagctgcccaccctgacagtgaggagcagcagcagcggctgcgggaggcagctgaggggctgcgcatggccaccaatgcagctgcgcagaatgccatcaagaaaaagctggtgcagcgcctggagcatgcagccaagcaggctgcagcctcagccacacagaccatcgctgcagctcagcacgcagcctctacccccaaagcctctgccggcccccagcccctgctggtgcagagctgcaaggcagtggcagagcagattccactgctggtgcagggcgtccgaggaagccaagcccagcctgacagccccagcgctcagcttgccctcattgctgccagccagagcttcctgcagccaggtgggaagatggtggcagctgcaaaggcctcagtgccaacgattcaggaccaggcttcagccatgcagctgagtcagtgtgccaagaacctgggcaccgcgctggctgaactccggacggctgcccagaaggctcaggaagcatgtggacctttggagatggattctgcactgagtgtggtacagaatctagagaaagatctacaggaagtgaaggcagcagctcgagatggcaagcttaaacccttacctggggagacaatggagaagtgtacccaggacctgggcaacagcaccaaagccgtgagctcagccatcgcccagctactgggagaggttgcccagggcaatgagaattatgcaggtattgcagctcgggatgtggcaggtgggctgcggtcactggcccaggccgctaggggagtcgctgcactgacgtcagatcctgcagtgcaggccattgtacttgatacggccagtgatgtgctggacaaggccagcagcctcattgaggaggcgaaaaaggcagctggccatccaggggaccctgagagccagcagcggcttgcccaggtggctaaagcagtgacccaggctctgaaccgctgtgtcagctgcctacctggccagcgcgatgtggataatgccctgagggcagttggagatgccagcaagcgactcctgagtgactcgcttcctcctagcactgggacatttcaagaagctcagagccggttgaatgaagctgctgctgggctgaatcaggcagccacagaactggtgcaggcctctcggggaacccctcaggacctggctcgagcctcaggccgatttggacaggacttcagcaccttcctggaagctggtgtggagatggcaggccaggctccgagccaggaggaccgagcccaagttgtgtccaacttgaagggcatctccatgtcttcaagcaaacttcttctggctgccaaggccctgtccacggaccctgctgcccctaacctcaagagtcagctggctgcagctgccagggcagtaactgacagcatcaatcagctcatcactatgtgcacccagcaggcacccggccagaaggagtgtgataacgccctgcgggaattggagacggtccgggaactcctggagaacccagtccagcccatcaatgacatgtcctactttggttgcctggacagtgtaatggagaactcaaaggtgctgggcgaggccatgactggcatctcccaaaatgccaagaacggaaacctgccagagtttggagatgccatttccacagcctcaaaggcactttgtggcttcaccgaggcagctgcacaggctgcatatctggttggtgtctctgaccccaatagccaagctggacagcaagggctagtggagcccacacagtttgcccgtgcaaaccaggcaattcagatggcctgccagagtttgggagagcctggctgtacccaggcccaggtgctctctgcagccaccattgtggctaaacacacctctgcactgtgtaacagctgtcgcctggcttctgcccgtaccaccaatcctactgccaagcgccagtttgtacagtcagccaaggaggtggccaacagcacagctaatcttgtcaagaccatcaaggcgctagatggggccttcacagaggagaaccgtgcccagtgccgagcagcaacagcccctctgctggaggctgtggacaatctgagtgcctttgcgtccaaccctgagttctccagcattcctgcccagatcagccctgagggtcgggctgccatggagcccattgtgatctctgccaagacaatgttagagagtgccgggggactcatccagacagcccgggccctcgcagtcaatccccgggaccccccgagctggtcggtgctggccggccactcccgtactgtctcagactccatcaagaagctaattacaagcatgagggacaaggctccagggcagctggagtgtgaaacggccattgcagctctgaacagttgtctacgggacctagaccaggcttccctcgctgcagtcagccagcagcttgctccccgtgagggaatctctcaagaggccttgcacactcagatgctcactgcagtccaagagatctcccatctcattgagccgctggccaatgctgcccgggctgaagcctcccagctgggacacaaggtgtcccagatggcgcagtactttgagccgctcaccctggctgcagtgggtgctgcctccaagaccctgagccacccgcagcagatggcactcctggaccagactaaaacattggcagagtctgccctgcagttgctatacactgccaaggaggctggtggtaacccaaagcaagcagctcacacccaggaagccctggaggaggctgtgcagatgatgaccgaggccgtagaggacctgacaacaaccctcaacgaggcagccagtgctgctggggtcgtgggtggcatggtggactccatcacccaggccatcaaccagctagatgaaggaccaatgggtgaaccagaaggttccttcgtggattaccaaacaactatggtgcggacagccaaggccattgcagtgaccgttcaggagatggttaccaagtcaaacaccagcccagaggagctgggccctcttgctaaccagctgaccagtgactatggccgtctggcctcggaggccaagcctgcagcggtggctgctgaaaatgaagagataggttcccatatcaaacaccgggtacaggagctgggccatggctgtgccgctctggtcaccaaggcaggcgccctgcagtgcagccccagtgatgcctacaccaagaaggagctcatagagtgtgcccggagagtctctgagaaggtctcccacgtcctggctgcgctccaggctgggaatcgtggcacccaggcctgcatcacagcagccagcgctgtgtctggtatcattgctgacctcgacaccaccatcatgttcgccactgctggcacgctcaatcgtgagggtactgaaactttcgctgaccaccgggagggcatcctgaagactgcgaaggtgctggtggaggacaccaaggtcctggtgcaaaacgcagctgggagccaggagaagttggcgcaggctgcccagtcctccgtggcgaccatcacccgcctcgctgatgtggtcaagctgggtgcagccagcctgggagctgaggaccctgagacccaggtggtactaatcaacgcagtgaaagatgtagccaaagccctgggagacctcatcagtgcaacgaaggctgcagctggcaaagttggagatgaccctgctgtgtggcagctaaagaactctgccaaggtgatggtgaccaatgtgacatcattgcttaagacagtaaaagccgtggaagatgaggccaccaaaggcactcgggccctggaggcaaccacagaacacatacggcaggagctggcggttttctgttccccagagccacctgccaagacctctaccccagaagacttcatccgaatgaccaagggtatcaccatggcaaccgccaaggccgttgctgctggcaattcctgtcgccaggaagatgtcattgccacagccaatctgagccgccgtgctattgcagatatgcttcgggcttgcaaggaagcagcttaccacccagaagtggcccctgatgtgcggcttcgagccctgcactatggccgggagtgtgccaatggctacctggaactgctggaccatgtactgctgaccctgcagaagccaagcccagaactgaagcagcagttgacaggacattcaaagcgtgtggctggttccgtcactgagctcatccaggctgctgaagccatgaagggaacagaatgggtagacccagaggaccccacagtcattgctgagaatgagctcctgggagctgcagccgccattgaggctgcagccaaaaagctagagcagctgaagccccgggccaaacccaaggaggcagatgagtccttgaactttgaggagcagatactagaagctgccaagtccattgcagcagccaccagtgcactggtaaaggctgcgtcggctgcccagagagaactagtggcccaagggaaggtgggtgccattccagccaatgcactggacgatgggcagtggtcccagggcctcatttctgctgcccggatggtggctgcggccaccaacaatctgtgtgaggcagccaatgcagctgtacaaggccatgccagccaggagaagctcatctcatcagccaagcaggtagctgcctccacagcccagctccttgtggcctgcaaggtcaaggctgaccaggactcggaggcaatgaaacgacttcaggctgctggcaacgcagtgaagcgagcctcagataatctggtgaaagcagcacagaaggctgcagcctttgaagagcaggagaatgagacagtggtggtgaaagagaagatggttggcggcattgcccagatcatcgcagcacaggaagaaatgcttcggaaggaacgagagctggaagaggcgcggaagaaactggcccagatccggcagcagcagtacaagtttctgccttcagagcttcgagatgagcactaaagaagcctcttctatttaatgcagacccggcccagagactgtgcgtgccactaccaaagccttctgggctgtcggggcccaacctgcccaaccccagcactccccaaagtgcctgccaaaccccagggcctggccccgcccagtcccgcagtacatcccctgtcccctccccaaccccaagtgccttcatgccctagggccccccaagtgcctgcccctccccagagtattaacgctccaagagtattattaacgctgctgtacctcgatctgaatctgccggggccccagcccactccaccctgccagcagcttccagccagtccccacagcctcatcagctctcttcaccgttttttgatactatcttcccccacccccagctacccataggggctgcagagttataagccccaaacaggtcatgctccaataaaaatgattctacctacaaaaaaaaaaaaaaaaaaa

SEQ ID NO: 108 - DNA, 2487 bp, Homo sapiens
gccgcttccctcgccgccgccccgccagcatgcccggcgtggcccgcctgccgctgctgctcgggctgctgctgctcccgcgtcccggccggccgctggacttggccgactacacctatgacctggcggaggaggacgactcggagcccctcaactacaaagacccctgcaaggcggctgcctttcttggggacattgccctggacgaagaggacctgagggccttccaggtacagcaggctgtggatctcagacggcacacagctcgtaagtcctccatcaaagctgcagttccaggaaacacttctacccccagctgccagagcaccaacgggcagcctcagaggggagcctgtgggagatggagaggtagatcccgtagccggcgggcggcgacgtcccgaccagagcgtgtgtggcccgatggggtcatcccctttgtcattgggggaaacttcactggtagccagagggcagtcttccggcaggccatgaggcactgggagaagcacacctgtgtcaccttcctggagcgcactgacgaggacagctatattgtgttcacctatcgaccttgcgggtgctgctcctacgtgggtcgccgcggcgggggcccccaggccatctccatcggcaagaactgtgacaagttcggcattgtggtccacgagctgggccacgtcgtcggcttctggcacgaacacactcggccagaccgggaccgccacgtttccatcgttcgtgagaacatccagccagggcaggagtataacttcctgaagatggagcctcaggaggtggagtccctgggggagacctatgacttcgacagcatcatgcattacgctcggaacacattctccaggggcatcttcctggataccattgtccccaagtatgaggtgaacggggtgaaacctcccattggccaaaggacacggctcagcaagggggacattgcccaagcccgcaagctttacaagtgcccagcctgtggagagaccctgcaagacagcacaggcaacttctcctcccctgaataccccaatggctactctgctcacatgcactgcgtgtggcgcatctctgtcacacccggggagaagatcatcctgaacttcacgtccctggacctgtaccgcagccgcctgtgctggtacgactatgtggaggtccgagatggcttctggaggaaggcgcccctccgaggccgcttctgcgggtccaaactccctgagcctatcgtctccactgacagccgcctctgggttgaattccgcagcagcagcaattgggttggaaagggcttctttgcagtctacgaagccatctgcgggggtgatgtgaaaaaggactatggccacattcaatcgcccaactacccagacgattaccggcccagcaaagtctgcatctggcggatccaggtgtctgagggcttccacgtgggcctcacattccagtcctttgagattgagcgccacgacagctgtgcctacgactatctggaggtgcgcgacgggcacagtgagagcagcaccctcatcgggcgctactgtggctatgagaagcctgatgacatcaagagcacgtccagccgcctctggctcaagttcgtctctgacgggtccattaacaaagcgggctttgccgtcaactttttcaaagaggtggacgagtgctctcggcccaaccgcgggggctgtgagcagcggtgcctcaacaccctgggcagctacaagtgcagctgtgaccccgggtacgagctggccccagacaagcgccgctgtgaggctgcttgtggcggattcctcaccaagctcaacggctccatcaccagcccgggctggcccaaggagtacccccccaacaagaactgcatctggcagctggtggcccccacccagtaccgcatctccctgcagtttgacttctttgagacagagggcaatgatgtgtgcaagtacgacttcgtggaggtgcgcagtggactcacagctgactccaagctgcatggcaagttctgtggttctgagaagcccgaggtcatcacctcccagtacaacaacatgcgcgtggagttcaagtccgacaacaccgtgtccaaaaagggcttcaaggcccacttcttctcagaaaagaggccagctctgcagccccctcggggacgcccccaccagctcaaattccgagtgcagaaaagaaaccggaccccccagtgaggcctgccaggcctcccggaccccttgttactcaggaacctcaccttggacggaatgggatgggggcttcggtgcccaccaaccccccacctccactctgccattccggcccacctccctctggccggacagaactggtgctctcttctccccactgtgcccgtccgcggaccggggacccttccccgtgccctaccccctcccattttgatggtgtctgtgacatttcctgttgtgaagtaaaagagggacccctgcgtcctgc

SEQ ID NO: 109 - DNA, 1015 bp, Homo sapiens
ggcacgaggcccgtcagctgtcccagagcctgtgtcgcgcccgtgccggtagcgcccgtgccggtagcgccgctgccaccgctcaccatgggcccgggtcctcggctgctgctacctctcgtgctttgcgtggggctcggcgcacttgtgttttcttcgggggccgagggcttccgcaagcgaggcccctcggtgacggccaaggtcttctttgatgtgaggattggagacaaagatgttggcagaattgtgattggcctctttggaaaagttgtgcccaagacagtggaaaattttgttgctctagcaacaggagagaaaggatatggatataaaggaagcaagtttcatcgtgtcatcaaggatttcatgattcaaggaggtgacatcaccactggagatggcactgggggtgtgagcatctatggtgagacatttccagatgagaacttcaagctgaagcactatggcattgggtgggtcagcatggccaacgctgggcctgacaccaatggctctcagttctttatcaccttgaccaagcccacctggttggacggcaaacatgtggtgtttggaaaagtcattgatgggatgacagtggtgcactccatagagctccaagcaactgatgggcatgaccgtccactcaccaactgctcgatcatcaacagtggcaagatagacgtgaaaacgccttttgtggttgagatcgctgattggtgacacaactggcagaaaacaaggatatgctttggcaggggtgtgtgtgtgtgtgtgtgtgtgtgtgtgttgtgttgtctttcaattatttgctttttttttttactttctttttgtattctatcccagatcacaggaaagttataaaaatcaaaccgtcaccctttagtttgcttgaactttagtaaaccacctgcttagggactttgaacttaaatatatccccttcctcaagtggtgctattttaaaactaaaaaaaactttgaattggcaaaaaaaaaaaaaaaaaaa

SEQ ID NO: 110 - DNA, 2852 bp, Homo sapiens
ggcacgagggcttccacatgtgtcaagcggctggctcagcccagagtccctgtctcccgcccgccggcccgagccgccgcccctcccccgcctcccgtgcgcccgggacaatcctcgccttgtctgtggcgccggcatctggagctttctgtagcctccggatacgcctttttttcagggcgtagccccagccaagctgctccccgcggcggccgcacagcagcccgagcgccccctttccggagctcccctccggagctgggatccaggcgcgtagcggagatcccaggatcctgggtgctgtctgggcccgctccccaccatgacctcctcggggcctggaccccggttcctgctgctgctgccgctgctgctgccccctgcggcctcagcctccgaccggccccggggccgagacccggtcaacccagagaagctgctggtgatcactgtggccacagctgaaaccgaggggtacctgcgtttcctgcgctctgcggagttcttcaactacactgtgcggaccctgggcctgggagaggagtggcgagggggtgatgtggctcgaacagttggtggaggacagaaggtccggtggttaaagaaggaaatggagaaatacgctgaccgggaggatatgatcatcatgtttgtggatagctacgacgtgattctggccggcagccccacagagctgctgaagaagttcgtccagagtggcagccgcctgctcttctctgcagagagcttctgctggcccgagtgggggctggcggagcagtaccctgaggtgggcacggggaagcgcttcctcaattctggtggattcatcggttttgccaccaccatccaccaaatcgtgcgccagtggaagtacaaggatgatgacgacgaccagctgttctacacacggctctacctggacccaggactgagggagaaactcagccttaatctggatcataagtctcggatctttcagaacctcaacggggctttagatgaagtggttttaaagtttgatcggaaccgtgtgcgtatccggaacgtggcctacgacacgctccccattgtggtccatggaaacggtcccactaagctgcagctcaactacctgggaaactacgtccccaatggctggactcctgagggaggctgtggcttctgcaaccaggaccggaggacactcccgggggggcagcctcccccccgggtgtttctggccgtgtttgtggaacagcctactccgtttctgccccgcttcctgcagcggctgctactcctggactatccccccgacagggtcacccttttcctgcacaacaacgaggtcttccatgaaccccacatcgctgactcctggccgcagctccaggaccacttctcagctgtgaagctcgtggggccggaggaggctctgagcccaggcgaggccagggacatggccatggacctgtgtcggcaggaccccgagtgtgagttctacttcagcctggacgccgacgctgtcctcaccaacctgcagaccctgcgtatcctcattgaggagaacaggaaggtgatcgcccccatgctgtcccgccacggcaagctgtggtccaacttctggggcgccctgagccccgatgagtactacgcccgctccgaggactacgtggagctggtgcagcggaagcgagtgggtgtgtggaatgtaccatacatctcccaggcctatgtgatccggggtgataccctgcggatggagctgccccagagggatgtgttctcgggcagtgacacagacccggacatggccttctgtaagagctttcgagacaagggcatcttcctccatctgagcaatcagcatgaatttggccggctcctggccacttccagatacgacacggagcacctgcaccccgacctctggcagatcttcgacaaccccgtcgactggaaggagcagtacatccacgagaactacagccgggccctggaaggggaaggaatcgtggagcagccatgcccggacgtgtactggttcccactgctgtcagaacaaatgtgtgatgagctggtggcagagatggagcactacggccagtggtcaggcggccggcatgaggattcaaggctggctggaggctacgagaatgtgcccaccgtggacatccacatgaagcaggtggggtacgaggaccagtggctgcagctgctgcggacgtatgtgggccccatgaccgagagcctgtttcccggttaccacaccaaggcgcgggcggtgatgaactttgtggttcgctaccggccagacgagcagccgtctctgcggccacaccacgactcatccaccttcaccctcaacgttgccctcaaccacaagggcctggactatgagggaggtggctgccgcttcctgcgctacgactgtgtgatctcctccccgaggaagggctgggcactcctgcaccccggccgcctcacccactaccacgaggggctgccaacgacctggggcacacgctacatcatggtgtcctttgtcgacccctgacactcaaccactctgccaaacctgccctgccattgtgcctttttagggggcctggcccccgtcctgggagttgggggatgggtctctctgtctccccacttcctgagttcatgttccgcgtgcctgaactgaatatgtcaccttgctcccaagacacggccctctcaggaagctcccggagtccccgcctctctcctccgcccacaggggttcgtgggcacagggcttctggggactccccgcgtgataaattattaatgttccgcagtctcactctgaataaaggacagtttgtaaaaaaaaaaaaaaaaaa

SEQ ID NO: 111 - DNA, 6496 bp, Homo sapiens
cgcactctccgtccccgcggctggcgcaggacctcactcgagcggagcgcccacggggagcgggtcgcggggcggcggcggcgaggaggaggcgagaaggagttggaggaggaggaggaggaggcgagggcgagcgagcccagcggggtcccggccgccccgcgggccaaagtcgagccctcccgcccgtgggcgagcgcgccagccgccccttccagaacagccgccgccacaaagaagaacggggggtgccgaggtccccatgacctcctaaagtggtgcggtccctgctgagtgcgctgcccgggccgtgacccgcgcccctgtgcgtccccgcgcgcctccgagcgcccctgtgcgccccggcccgcgccccgccggcatggacgtccatacccgctggaaagcgcgcagcgcgctccgcccgggcgccccgctgctgcccccgctgctgctgctgctgctgtgggcgccgcctccgagccgcgcagctcagccagcagatctcctgaaggttctagattttcacaacttgcctgatggaataacaaagacaacaggcttttgcgccacgcggcgatcttccaaaggcccggatgtcgcttacagagtcaccaaagacgcgcagctcagcgcacccaccaagcagctgtaccctgcgtctgcatttcccgaggacttctccatcctaacaactgtgaaagccaagaaaggcagccaggccttcctggtctccatctacaacgagcagggtatccagcagattgggctggagctgggccgctctcccgtcttcctctacgaggaccacacggggaagcctggcccggaagactaccccctcttccggggcatcaacctgtcagatggcaagtggcacagaattgctctcagcgtccacaagaaaaatgtcaccttgatcctcgactgtaaaaagaagaccaccaaattcctcgaccgcagcgaccaccccatgatcgacatcaatggcatcatcgtgtttggcacccggatcctggatgaggaggtgtttgagggtgacatccagcagctgctctttgtctcggaccaccgggcagcttatgattactgtgagcactacagccctgactgtgacaccgcagtacctgacaccccacagtcgcaggaccccaatccagatgaatattacacggaaggagacggcgagggtgagacctattactacgaatacccctactacgaagaccccgaagacctagggaaggagcccacccccagcaagaagcccgtggaagctgccaaagaaaccacagaggtccccgaggagctgaccccgacccccacggaagctgctcccatgcctgaaaccagtgaaggggctgggaaggaagaggacgtcggcatcggggactatgactacgtgcccagtgaggactactacacgccctcaccgtatgatgacctcacctatggcgagggggaggagaaccctgaccagcccacagacccaggcgctggggccgaaattcccaccagcaccgccgacacctccaactcctccaatccagctccgcctccaggggaaggtgcggatgacttggagggggagttcactgaggaaacgatccggaaccttgacgagaactactacgacccctactacgaccccaccagctccccgtcggagatcgggccgggaatgccggcgaaccaggataccatctatgaagggattggaggacctcggggcgagaaaggccaaaagggagaaccagcgattatcgagccgggcatgctcatcgagggcccgcctggcccagaaggccccgcgggtcttcccggacctccaggaaccatgggtcccactggccaagtcggggaccctggagaaaggggcccccctggacgcccaggccttcctggggccgatggcctgcccggtcctccaggaaccatgctcatgctgcccttccggtttggaggtggcggcgatgcgggctccaaaggccccatggtctcagcccaggagtcccaggcgcaagccattctccagcaggccaggttggcactgaggggaccagctggcccgatgggtctcacagggagacctggccctgtgggtccccctgggagcggaggtttgaagggcgagccgggagacgtggggcctcagggtcctcgaggtgtgcaaggcccgcctggtccggccgggaagcccggaagacggggtcgggctgggagtgatggagccagaggaatgcctggacaaactggccccaagggtgaccggggtttcgacggcctggctgggttgccaggcgagaagggccacaggggtgaccctggtccttccggcccaccaggacctccgggagacgatggagaaaggggtgacgacggagaagttgggcccagggggctgcctggggagcccgggccacgtggtctgcttgggccgaaagggcccccaggtcctcccggacctcccggtgtcacgggtatggacggccagccggggccaaaaggaaatgtgggtccccagggagagcctggccccccaggacagcagggtaatccaggcgcccagggtcttccaggcccccagggtgcaattggtcctccaggagaaaagggtcccttggggaaaccaggccttccaggaatgcccggtgctgacggacccccgggacaccctggcaaagaaggccctccaggagagaaaggaggtcagggtccacctggcccccagggtccgattggctacccaggtcctcgaggagtcaagggggccgatggcatccgtggtctgaagggcacaaagggcgagaagggtgaagacggctttcctgggtttaaaggagacatgggcatcaagggtgatcggggggagatcggcccacccggtcccaggggagaagatggccctgaaggcccaaagggtcgcggaggtcccaatggtgaccccggtcctctgggaccccctggggagaagggaaaactcggagtcccagggttaccagggtatccaggaagacaaggaccaaagggctctattggattccctggatttcctggcgccaatggagagaagggcggcagggggacccctggaaagccaggaccgcgggggcagcgaggcccaacgggtccgaggggtgaaagaggcccccggggcatcactgggaagcctggccccaagggcaactccggaggtgacggcccagctggccctcctggtgaacggggacccaatggaccccaaggacccacaggatttcctggaccaaagggcccccctggccctccaggcaaggatggactcccaggacaccctggacagagaggcgagactggtttccaaggcaagaccggccctccaggcccccccggcgtggtcggccctcagggtcccacgggagaaacgggcccaatgggtgagcgtggccaccctgggccccctggaccccccggtgaacaggggcttccgggccttgctggaaaagaagggacgaagggtgacccaggccctgcaggcctccctgggaaagatggccctccaggattacgtggtttccctggggaccgagggcttcctggtccagtgggagctcttggactgaaaggcaatgaagggccccctggcccaccaggccctgcgggatctccaggggagagaggtccagctggagccgctgggcccatcggaattccagggagacctgggccccagggacccccagggccggcaggagagaaaggggctcctggcgagaaaggcccacaaggcccagctggccgagacggtctccaggggcctgtggggctcccgggtccagctggccctgtgggtccccctggagaagacggagataagggagagatcggggagccggggcagaaaggaagcaagggggacaaaggagaacagggtcctcctgggcctacaggtcctcaaggccccatcggacagccaggcccctctggagctgacggcgagccggggcctcggggccagcagggccttttcgggcagaaaggtgatgaaggtcccagaggctttcctggaccccctgggccagtggggctgcagggtttgccaggacctccaggcgagaagggtgagacaggagacgtgggccagatgggccccccgggtccccctggcccccgaggaccctccggagctccaggtgctgatggcccacaaggtcccccaggtggaataggaaaccctggtgcagtgggagagaagggcgagcctggcgaagcaggtgagcctggcccttccgggagaagcggccccccgggacccaaaggagaaaggggagagaagggcgagtcaggcccttcaggtgctgccggaccccctggacccaaaggccctcccggagatgatggtcccaaaggcagccctggcccagtgggttttcctggagatcctggcccccccggagagcctggccccgcgggtcaagatggtccccctggtgacaaaggagatgatggtgaacccgggcagacgggatcccccggccctactggtgaaccaggtccatcggggcctccaggaaaaaggggtcccccaggccccgcaggccccgaaggcagacagggagagaaaggggccaagggagaagccggcttggaaggccctcctgggaagactggccccatcggcccccagggggcccctgggaagcccggaccggatggccttcgagggatccctggccctgtgggagaacaaggtctcccaggatccccaggcccggacggtccccccggccccatgggtcccccaggacttcccggcctcaaaggagattctggtcccaaaggtgaaaagggtcatccaggcctgatcgggctcatcggtcctccgggtgaacagggtgagaagggcgaccgtggtctccctggcccccagggctcctccggtcctaagggagaacagggtatcactggtccttctggcccgattgggcctcctgggccccctggcctgccgggtccgcctggtccaaaaggtgctaagggctcctcgggtccaactggcccgaagggtgaggcaggccacccaggacccccaggccccccgggccccccgggagaggtcatccagcccctgccaatccaggcatccaggacgcggcggaacatcgacgccagccagctgctggacgacgggaatggcgagaactacgtggactacgcggacggcatggaagagatcttcggctctctcaactctctgaagctggagattgagcagatgaaacggcccctgggcacgcagcagaaccccgcccgcacctgcaaggacctgcagctctgccaccccgacttcccagatggtgaatactgggtcgatcctaaccaaggatgctccagggattccttcaaggtttactgcaacttcacagccggggggtcgacatgcgtcttccctgacaagaagtccgaaggggccagaatcacttcttggcccaaagaaaacccgggctcctggttcagtgaattcaagcgtgggaaactgctctcctatgtggacgccgagggcaaccctgtgggtgtggtacagatgaccttcctgcggctgctgagcgcctctgcccaccagaacgtcacctaccactgctaccagtcagtggcctggcaggacgcagccacgggcagctacgacaaggccctccgcttcctgggctccaacgacgaggagatgtcctatgacaacaacccctacatccgcgccctggtggacggctgtgctaccaagaaaggctaccagaagacggttctggagatcgacacccccaaagtggagcaggtgcccatcgtggacatcatgttcaatgacttcggtgaagcgtcacagaaatttggatttgaagtggggccggcttgcttcatgggctaggagccgccgagcccgggctcccgagccgaattcagcaacctcgtacctcagcatgccattgcttcgtgagtgtcccgtgcacgtcctgatcctggacagtgaaggcttctccctcccctcccacctgacttcatctacgcctcggcaccacggggtgtgggaccccagcccggagagaacagagggaaggagccgcgcccccacctggagctgaatcacatgacctagctgcaccccagcgcctgggcccgccccacgctctgtccacacccatgcgccccgggagcggggccatgcctccagccccccagctcgcccgacccatcctgttcgtgaataggtctcaggggttgggggagggactgccagatttggacactatatttttttctaaattcaacttgaagatgtgtatttcccctgaccttcaaaaaatgttccaaggtaagcctcgtaaaggtcatcccaccatcaccaaagcctccgtttttaacaacctccaacacgatccatttagaggccaaatgtcattctgcaggtgccttcccgatggattaaaggtgcttatgtttttgtgagttttaagtaaatatttgt

SEQ ID NO: 112 - DNA, 1630 bp, Homo sapiens
agggccggggtggggcgctggcgtttccgttgcttggatcagtctaggtgcagctgcggatccttcagcgtctgcatctcggcgtcgccccgcgtaccgtcgcccggctctccgccgctctcccgggggttcggggcacttgggtcccacagtctggtcctgcttcaccttcccctgacctgagtagtcgccatggcacaggttctcagaggcactgtgactgacttccctggatttgatgagcgggctgatgcagaaactcttcggaaggctatgaaaggcttgggcacagatgaggagagcatcctgactctgttgacatcccgaagtaatgctcagcgccaggaaatctctgcagcttttaagactctgtttggcagggatcttctggatgacctgaaatcagaactaactggaaaatttgaaaaattaattgtggctctgatgaaaccctctcggctttatgatgcttatgaactgaaacatgccttgaagggagctggaacaaatgaaaaagtactgacagaaattattgcttcaaggacacctgaagaactgagagccatcaaacaagtttatgaagaagaatatggctcaagcctggaagatgacgtggtgggggacacttcagggtactaccagcggatgttggtggttctccttcaggctaacagagaccctgatgctggaattgatgaagctcaagttgaacaagatgctcaggctttatttcaggctggagaacttaaatgggggacagatgaagaaaagtttatcaccatctttggaacacgaagtgtgtctcatttgagaaaggtgtttgacaagtacatgactatatcaggatttcaaattgaggaaaccattgaccgcgagacttctggcaatttagagcaactactccttgctgttgtgaaatctattcgaagtatacctgcctaccttgcagagaccctctattatgctatgaagggagctgggacagatgatcataccctcatcagagtcatggtttccaggagtgagattgatctgtttaacatcaggaaggagtttaggaagaattttgccacctctctttattccatgattaagggagatacatctggggactataagaaagctcttctgctgctctgtggagaagatgactaacgtgtcacggggaagagctccctgctgtgtgcctgcaccaccccactgccttccttcagcacctttagctgcatttgtatgccagtgcttaacacattgccttattcatactagcatgctcatgaccaacacatacacgtcatagaagaaaatagtggtgcttctttctgatctctagtggagatctctttgactgctgtagtactaaagtgtacttaatgttactaagtttaatgcctggccattttccatttatatatattttttaagaggctagagtgcttttagccttttttaaaaactccatttatattacatttgtaaccatgatactttaattagaagcttagccttgaaattgtgaactcttggaaatgttattagtgaagttcgcaactaaactaaacctgtaaaattatgatgattgtattcaaaagattaatgaaaaataaacatttctgtccccctgaattat

SEQ ID NO: 113 - DNA, 4350 bp, Homo sapiens
agttgagggattgacacaaatggtcaggcggcggcggcggagaaggaggcggaggcgcaggggggagccgagcccgctgggctgcggagagttgcgctctctacggggccgcggccactagcgcggcgccgccagccgggagccagcgagccgagggccaggaaggcgggacacgaccccggcgcgccctagccacccgggttctccccgccgcccgcgcttcatgaatcgcaagtttccgcggcggcggcggctgcggtacgcagaacaggagccgggggagcgggccgaaagcggcttgggctcgacggagggcacccgcgcagaggtctccctggccgcagggggagccgccgccggccgtgcccctggcagccccagcggagcggcgccaagagaggagccgagaaagtatggctgaggaggaggcgcctaagaagtcccgggccgccggcggtggcgcgagctgggaactttgtgccggggcgctctcggcccggctggcggaggagggcagcggggacgccggtggccgccgccgcccgccagttgacccccggcgattggcgcgccagctgctgctgctgctttggctgctggaggctccgctgctgctgggggtccgggcccaggcggcgggccaggggccaggccaggggcccgggccggggcagcaaccgccgccgccgcctcagcagcaacagagcgggcagcagtacaacggcgagcggggcatctccgtcccggaccacggctattgccagcccatctccatcccgctgtgcacggacatcgcgtacaaccagaccatcatgcccaacctgctgggccacacgaaccaggaggacgcgggcctggaggtgcaccagttctaccctctagtgaaagtgcagtgttccgctgagctcaagttcttcctgtgctccatgtacgcgcccgtgtgcaccgtgctagagcaggcgctgccgccctgccgctccctgtgcgagcgcgcgcgccagggctgcgaggcgctcatgaacaagttcggcttccagtggccagacacgctcaagtgtgagaagttcccggtgcacggcgccggcgagctgtgcgtgggccagaacacgtccgacaagggcaccccgacgccctcgctgcttccagagttctggaccagcaaccctcagcacggcggcggagggcaccgtggcggcttcccggggggcgccggcgcgtcggagcgaggcaagttctcctgcccgcgcgccctcaaggtgccctcctacctcaactaccacttcctgggggagaaggactgcggcgcaccttgtgagccgaccaaggtgtatgggctcatgtacttcgggcccgaggagctgcgcttctcgcgcacctggattggcatttggtcagtgctgtgctgcgcctccacgctcttcacggtgcttacgtacctggtggacatgcggcgcttcagctacccggagcggcccatcatcttcttgtccggctgttacacggccgtggccgtggcctacatcgccggcttcctcctggaagaccgagtggtgtgtaatgacaagttcgccgaggacggggcacgcactgtggcgcagggcaccaagaaggagggctgcaccatcctcttcatgatgctctacttcttcagcatggccagctccatctggtgggtgatcctgtcgctcacctggttcctggcggctggcatgaagtggggccacgaggccatcgaagccaactcacagtattttcacctggccgcctgggctgtgccggccatcaagaccatcaccatcctggcgctgggccaggtggacggcgatgtgctgagcggagtgtgcttcgtggggcttaacaacgtggacgcgctgcgtggcttcgtgctggcgcccctcttcgtgtacctgtttatcggcacgtcctttctgctggccggctttgtgtcgctcttccgcatccgcaccatcatgaagcacgatggcaccaagaccgagaagctggagaagctcatggtgcgcattggcgtcttcagcgtgctgtacactgtgccagccaccatcgtcatcgcctgctacttctacgagcaggccttccgggaccagtgggaacgcagctgggtggcccagagctgcaagagctacgctatcccctgccctcacctccaggcgggcggaggcgccccgccgcacccgcccatgagcccggacttcacggtcttcatgattaagtaccttatgacgctgatcgtgggcatcacgtcgggcttctggatctggtccggcaagaccctcaactcctggaggaagttctacacgaggctcaccaacagcaaacaaggggagactacagtctgagacccggggctcagcccatgcccaggcctcggccggggcgcagcgatcccccaaagccagcgccgtggagttcgtgccaatcctgacatctcgaggtttcctcactagacaactctctttcgcaggctcctttgaacaactcagctcctgcaaaagcttccgtccctgaggcaaaaggacacgagggcccgactgccagagggaggatggacagacctcttgccctcacactctggtaccaggactgttcgcttttatgattgtaaatagcctgtgtaagatttttgtaagtatatttgtatttaaatgacgaccgatcacgcgtttttctttttcaaaagtttttaattatttagggcggtttaaccatttgaggcttttccttcttgcccttttcggagtattgcaaaggagctaaaactggtgtgcaaccgcacagcgctcctggtcgtcctcgcgcgcctctccctaccacgggtgctcgggacggctgggcgccagctccggggcgagttcagcactgcggggtgcgactagggctgcgctgccagggtcacttcccgcctcctccttttgccccctccccctccttctgtcccctccctttctttcctggcttgaggtaggggctcttaaggtacagaactccacaaaccttccaaatctggaggagggcccccatacattacaattcctcccttgctcggcggtggattgcgaaggcccgtcccttcgacttcctgaagctggatttttaactgtccagaactttcctccaacttcatgggggcccacgggtgtgggcgctggcagtctcagcctccctccacggtcaccttcaacgcccagacactcccttctcccaccttagttggttacagggtgagtgagataaccaatgccaaactttttgaagtctaatttttgaggggtgagctcatttcattctctagtgtctaaaacctggtatgggtttggccagcgtcatggaaagatgtggttactgagatttgggaagaagcatgaagctttgtgtgggttggaagagactgaagatatgggttataaaatgttaattctaattgcatacggatgcctggcaaccttgcctttgagaatgagacagcctgcgcttagattttaccggtctgtaaaatggaaatgttgaggtcacctggaaagctttgttaaggagttgatgtttgctttccttaacaagacagcaaaacgtaaacagaaattgaaaacttgaaggatatttcagtgtcatggacttcctcaaaatgaagtgctattttcttatttttaatcaaataactagacatatatcagaaactttaaaatgtaaaagttgtacactttcaacattttattacgattattattcagcagcacattctgaggggggaacaattcacaccaccaataataacctggtaagatttcaggaggtaaagaaggtggaataattgacggggagatagcgcctgaaataaacaaaatatgggcatgcatgctaaagggaaaatgtgtgcaggtctactgcattaaatcctgtgtgctcctcttttggatttacagaaatgtgtcaaatgtaaatctttcaaagccatttaaaaatattcactttagttctctgtgaagaagaggagaaaagcaatcctcctgattgtattgttttaaactttaagaatttatcaaaatgccggtacttaggacctaaatttatctatgtctgtcatacgctaaaatgatattggtctttgaatttggtatacatttattctgttcactatcacaaaatcatctatatttatagaggaatagaagtttatatatatataataccatatttttaatttcacaaataaaaaattcaaagttttgtacaaaattatatggattttgtgcctgaaaataatagagcttgagctgtctgaactattttacattttatggtgtctcatagccaatcccacagtgtaaaaattca

SEQ ID NO: 114 - DNA, 1348 bp, Homo sapiens
caggtggcgtacttggcttggagactggcgcggcgttcgtgtccgagttctctgcaggtcactagtttcccggtagttcagctgcacatgaatagaacagcaatgagagccagtcagaaggactttgaaaattcaatgaatcaagtgaaactcttgaaaaaggatccaggaaacgaagtgaagctaaaactctacgcgctatataagcaggccactgaaggaccttgtaacatgcccaaaccaggtgtatttgacttgatcaacaaggccaaatgggacgcatggaatgcccttggcagcctgcccaaggaagctgccaggcagaactatgtggatttggtgtccagtttgagtccttcattggaatcctctagtcaggtggagcctggaacagacaggaaatcaactgggtttgaaactctggtggtgacctccgaagatggcatcacaaagatcatgttcaaccggcccaaaaagaaaaatgccataaacactgagatgtatcatgaaattatgcgtgcacttaaagctgccagcaaggatgactcaatcatcactgttttaacaggaaatggtgactattacagtagtgggaatgatctgactaacttcactgatattccccctggtggagtagaggagaaagctaaaaataatgccgttttactgagggaatttgtgggctgttttatagattttcctaagcctctgattgcagtggtcaatggtccagctgtgggcatctccgtcaccctccttgggctattcgatgccgtgtatgcatctgacagggcaacatttcatacaccatttagtcacctaggccaaagtccggaaggatgctcctcttacacttttccgaagataatgagcccagccaaggcaacagagatgcttatttttggaaagaagttaacagcgggagaggcatgtgctcaaggacttgttactgaagttttccctgatagcacttttcagaaagaagtctggaccaggctgaaggcatttgcaaagcttcccccaaatgccttgagaatttcaaaagaggtaatcaggaaaagagagagagaaaaactacacgctgttaatgctgaagaatgcaatgtccttcagggaagatggctatcagatgaatgcacaaatgctgtggtgaacttcttatccagaaaatcaaaactgtgatgaccactacagcagagtaaagcatgtccaaggaaggatgtgctgttacctctgatttccagtactggaactaaataagcttcattgtgccttttgtagtgctagaatatcaattacaatgatgatatttcactacagctctgatgaataaaaagttttgtaaaac

SEQ ID NO: 115 - DNA, 1436 bp, Homo sapiens
cagctggagtgcgttctgccgaagcttgtggttgcacgcccatcgtcttaggggctaccttccgtgaccatgtccaagtctctgaagaagttggtggaggagagccgggagaagaaccagcccgaggtggacatgagtgaccggggcatctccaacatgctggatgtcaacggcctctttaccttatcccatatcacacaactggtcctcagccataacaagctaacaatggtgccaccgaacatcgcagaactgaagaatttggaggtgctcaacttttttaataaccaaatcgaggagctgcccacacagatcagtagccttcagaaactcaaacacctgaaccttggcatgaacaggctgaacactttgccacgaggcttcggctccctgccagctcttgaggttctggacttgacgtacaacaacttgagcgaaaattctcttcctggaaacttcttctacctgaccaccctgcgtgcactctatctaagtgacaacgattttgaaatcctgccgccagatattgggaagctcacaaagttgcagatactcagccttagggataacgacctgatctcgctgcctaaggaaatcggggagcttacccagcttaaagagctccacattcaggggaaccgcctcaccgttctgcccccagaactaggaaacttggatttaactggccagaagcaggtattcaaagcagagaacaatccctgggtgacccccattgcagaccagttccagcttggcgtgtcccatgtttttgagtatatccgttctgagacatacaaatacctctacggcagacacatgcaggccaacccagaaccaccgaagaagaataatgacaaatcgaaaaagatcagccggaaacccctggcagccaagaacagataaggaagggattggcatcggctggccttccagcaccttctctctccaacacttcattctctcttgccctgtctctcaaataaacccaatgctgcgtgtgaggccttttttatttttcttttcactctctttctaatgcttcccaccttaccttttagattcttttgctaggtgggagattgttataaggtctttaaaccatttccatttgtttctttaacattaccaaaagcagggaacaaagctcttattcaactgcgaattccatagtgggctctggcttttcttgaatagatatcacaaggttgcttattatcaaaagaataattaaaatcatgtaaccatttaaatgtcactgttaacacttttcactctttctgttgattcacctaactcattattttgctttattaaaagtcttccttcaccaccgagatatgctaatttaacttacaaatgattttaataaaatcttgagtttgtatcacatgttacttattgactcagaataaaagaacagtctgatcttggggtat

SEQ ID NO: 116 - DNA, 2131 bp, Homo sapiens
ctctttataatttagtttccatagaagttatatgtgcatttaaaaaaattcaatgctggagcgaccgtgtctggggagccgagccccgcttctcgctgcggtgagcccggactggggcacgcactgcgcagactccccgctgcagtgggcggagtcccacaggccccgcccctcctcccaccctcgttcagcctgtccagacagaagctggggcccagcggaggtagcagcagacgcctgagagcgaggccgaggccctcagggtttggagaccctgacacacccaccttctcacctgggctctgcgtatcccccagccttgagggaagatgaagcctaaactgatgtaccaggagctgaaggtgcctgcagaggagcccgccaatgagctgcccatgaatgagattgaggcgtggaaggctgcggaaaagaaagcccgctgggtcctgctggtcctcattctggcggttgtgggcttcggagcctgatgactcagctgtttctatgggaatacggcgacttgcatctctttgggcccaaccagcgcccagccccctgctatgacccttgcgaagcagtgctggtggaaagcattcctgagggcctggacttccccaatgcctccacggggaacccttccaccagccaggcctggctgggcctgctcgccggtgcgcacagcagcctggacatcgcctccttctactggaccctcaccaacaatgacacccacacgcaggagccctctgcccagcagggtgaggaggtcctccggcagctgcagaccctggcaccaaagggcgtgaacgtccgcatcgctgtgagcaagcccagcgggccccagccacaggcggacctgcaggctctgctgcagagcggtgcccaggtccgcatggtggacatgcagaagctgacccatggcgtcctgcataccaagttctgggtggtggaccagacccacttctacctgggcagtgccaacatggactggcgttcactgacccaggtcaaggagctgggcgtggtcatgtacaactgcagctgcctggctcgagacctgaccaagatctttgaggcctactggttcctgggccaggcaggcagctccatcccatcaacttggccccggttctatgacacccgctacaaccaagagacaccaatggagatctgcctcaatggaacccctgctctggcctacctggcgagtgcgcccccacccctgtgtccaagtggccgcactccagacctgaaggctctactcaacgtggtggacaatgcccggagtttcatctacgtcgctgtcatgaactacctgcccactctggagttctcccaccctcacaggttctggcctgccattgacgatgggctgcggcgggccacctacgagcgtggcgtcaaggtgcgcctgctcatcagctgctggggacactcggagccatccatgcgggccttcctgctctctctggctgccctgcgtgacaaccatacccactctgacatccaggtgaaactctttgtggtccccgcggatgaggcccaggctcgaatcccatatgcccgtgtcaaccacaacaagtacatggtgactgaacgcgccacctacatcggaacctccaactggtctggcaactacttcacggagacggcgggcacctcgctgctggtgacgcagaatgggaggggcggcctgcggagccagctggaggccattttcctgagggactgggactccccttacattcatgaccttgacacctcagctgacagcgtgggcaacgcctgccgcctgctctgaggcccgatccagtgggcaggccaaggcctgctgggcccccgcggacccaggtgctctgggtcacggtccctgtccccgcacccccgcttctgtctgccccattgtggctcctcaggctctctcccctgctctcccacctctacctccacccccaccggcctgacgctgtggccccgggacccagcagagctgggggagggatcagcccccaaagaaatgggggtgcatgctggcctgccccctggcccacccccactttccagggcaaaaagggcccagggttataataagtaaataacttgtctgtaaaaaaaaaaaaaaaaaaaaaaa

SEQ ID NO: 117 - DNA, 3320 bp, Homo sapiens
gtgggtgagcggcggccacggcatcctgtgctgtgggggctacgaggaaagatctaattatcatggacctgcgacagtttcttatgtgcctgtccctgtgcacagcctttgccttgagcaaacccacagaaaagaaggaccgtgtacatcatgagcctcagctcagtgacaaggttcacaatgatgctcagagttttgattatgaccatgatgccttcttgggtgctgaagaagcaaagacctttgatcagctgacaccagaagagagcaaggaaaggcttggaaagattgtaagtaaaatagatggcgacaaggacgggtttgtcactgtggatgagctcaaagactggattaaatttgcacaaaagcgctggatttacgaggatgtagagcgacagtggaaggggcatgacctcaatgaggacggcctcgtttcctgggaggagtataaaaatgccacctacggctacgttttagatgatccagatcctgatgatggatttaactataaacagatgatggttagagatgagcggaggtttaaaatggcagacaaggatggagacctcattgccaccaaggaggagttcacagctttcctgcaccctgaggagtatgactacatgaaagatatagtagtacaggaaacaatggaagatatagataagaatgctgatggtttcattgatctagaagagtatattggtgacatgtacagccatgatgggaatactgatgagccagaatgggtaaagacagagcgagagcagtttgttgagtttcgggataagaaccgtgatgggaagatggacaaggaagagaccaaagactggatccttccctcagactatgatcatgcagaggcagaagccaggcacctggtctatgaatcagaccaaaacaaggatggcaagcttaccaaggaggagatcgttgacaagtatgacttatttgttggcagccaggccacagattttggggaggccttagtacggcatgatgagttctgagctgcggaggaaccctcatttcctcaaaagtaatttatttttacagcttctggtttcacatgaaattgtttgcgctactgagactgttactacaaactttttaagacatgaaaaggcgtaatgaaaaccatcccgtccccattcctcctcctctctgagggactggagggaagccgtgcttctgaggaacaactctaattagtacacttgtgtttgtagatttacactttgtattatgtattaacatggcgtgtttatttttgtatttttctctggttgggagtatgatatgaaggatcaagatcctccactcacacatgtagacaaacattagctctttactctttctcaaccccttatatgattttaataattctcacttcactaattttgtaagcctgagatcaataagaaatgttcaggagagaggaaagaaaaaatatatatgctccacaatttatatttagagagagaacacttagtcttgcctgtcaaaaagtccaacatttcataggtagtaggggccacatattacattcagttgctataggtccagcaactgaacctgccattacctgggcaaggaaagatccctttgctctaggaaagcttggcccaaattgattttcttctttttccccctgtaggactgactgttggctaattttgtcaagcacagctgtggtgggaagagttagggccagtgtcttgaaaatcaatcaagtagtgaatgtgatctctttgcagagctatagatagaaacagctggaaaactaaaggaaaaatacaaatgttttcggggcatacattttttttctgggtgtgcatctgttgaaatgctcaagacttaattatttgccttttgaaatcactgtaaatgcccccatccggttcctcttcttcccaggtgtgccaaggaattaatcttggtttcactacaattaaaattcactcctttccaatcatgtcattgaaagtgcctttaacgaaagaaatggtcactgaatgggaattctcttaagaaaccctgagattaaaaaaagactatttggataacttataggaaagcctagaacctcccagtagagtggggatttttttcttcttccctttctcttttggacaatagttaaattagcagtattagttatgagtttggttgcagtgttcttatcttgtgggctgatttccaaaaaccacatgctgctgaatttaccagggatcctcatacctcacaatgcaaaccacttactaccaggcctttttctgtgtccactggagagcttgagctcacactcaaagatcagaggacctacagagagggctctttggtttgaggaccatggcttacctttcctgcctttgacccatcacaccccatttcctcctctttccctctccccgctgccaaaaaaaaaaaaaaggaaacgtttatcatgaatcaacagggtttcagtccttatcaaagagagatgtggaaagagctaaagaaaccaccctttgttcccaactccactttacccatattttatgcaacacaaacactgtccttttgggtccctttcttacagatggacctcttgagaagaattatcgtattccacgtttttagccctcaggttaccaagataaatatatgtatatataacctttattattgctatatctttgtggataatacattcaggtggtgctgggtgatttattataatctgaacctaggtatatcctttggtcttccacagtcatgttgaggtgggctccctggtatggtaaaaagccaggtataatgtaacttcaccccagcctttgtactaagctcttgatagtggatatactcttttaagtttagccccaatatagggtaatggaaatttcctgccctctgggttccccatttttactattaagaagaccagtgataatttaataatgccaccaactctggcttagttaagtgagagtgtgaactgtgtggcaagagagcctcacacctcactaggtgcagagagcccaggccttatgttaaaatcatgcacttgaaaagcaaaccttaatctgcaaagacagcagcaagcattatacggtcatcttgaatgatccctttgaaattttttttttgtttgtttgtttaaatcaagcctgaggctggtgaacagtagctacacacccatattgtgtgttctgtgaatgctagctctcttgaatttggatattggttattttttatagagtgtaaaccaagttttatattctgcaatgcgaacaggtacctatctgtttctaaataaaactgtttacattcaaaaa

SEQ ID NO: 118 - DNA, 3579 bp, Homo sapiens
agtttcctcggcagcggtaggcgagagcacgcggaggagcgtgcgcgggggccccgggagacggcggcggtggcggcgcgggcagagcaaggacgcggcggatcccactcgcacagcagcgcactcggtgccccgcgcagggtcgcgatgctgcccggtttggcactgctcctgctggccgcctggacggctcgggcgctggaggtacccactgatggtaatgctggcctgctggctgaaccccagattgccatgttctgtggcagactgaacatgcacatgaatgtccagaatgggaagtgggattcagatccatcagggaccaaaacctgcattgataccaaggaaggcatcctgcagtattgccaagaagtctaccctgaactgcagatcaccaatgtggtagaagccaaccaaccagtgaccatccagaactggtgcaagcggggccgcaagcagtgcaagacccatccccactttgtgattccctaccgctgcttagttggtgagtttgtaagtgatgcccttctcgttcctgacaagtgcaaattcttacaccaggagaggatggatgtttgcgaaactcatcttcactggcacaccgtcgccaaagagacatgcagtgagaagagtaccaacttgcatgactacggcatgttgctgccctgcggaattgacaagttccgaggggtagagtttgtgtgttgcccactggctgaagaaagtgacaatgtggattctgctgatgcggaggaggatgactcggatgtctggtggggcggagcagacacagactatgcagatgggagtgaagacaaagtagtagaagtagcagaggaggaagaagtggctgaggtggaagaagaagaagccgatgatgacgaggacgatgaggatggtgatgaggtagaggaagaggctgaggaaccctacgaagaagccacagagagaaccaccagcattgccaccaccaccaccaccaccacagagtctgtggaagaggtggttcgagaggtgtgctctgaacaagccgagacggggccgtgccgagcaatgatctcccgctggtactttgatgtgactgaagggaagtgtgccccattcttttacggcggatgtggcggcaaccggaacaactttgacacagaagagtactgcatggccgtgtgtggcagcgccatgtcccaaagtttactcaagactacccaggaacctcttgcccgagatcctgttaaacttcctacaacagcagccagtacccctgatgccgttgacaagtatctcgagacacctggggatgagaatgaacatgcccatttccagaaagccaaagagaggcttgaggccaagcaccgagagagaatgtcccaggtcatgagagaatgggaagaggcagaacgtcaagcaaagaacttgcctaaagctgataagaaggcagttatccagcatttccaggagaaagtggaatctttggaacaggaagcagccaacgagagacagcagctggtggagacacacatggccagagtggaagccatgctcaatgaccgccgccgcctggccctggagaactacatcaccgctctgcaggctgttcctcctcggcctcgtcacgtgttcaatatgctaaagaagtatgtccgcgcagaacagaaggacagacagcacaccctaaagcatttcgagcatgtgcgcatggtggatcccaagaaagccgctcagatccggtcccaggttatgacacacctccgtgtgatttatgagcgcatgaatcagtctctctccctgctctacaacgtgcctgcagtggccgaggagattcaggatgaagttgatgagctgcttcagaaagagcaaaactattcagatgacgtcttggccaacatgattagtgaaccaaggatcagttacggaaacgatgctctcatgccatctttgaccgaaacgaaaaccaccgtggagctccttcccgtgaatggagagttcagcctggacgatctccagccgtggcattcttttggggctgactctgtgccagccaacacagaaaacgaagttgagcctgttgatgcccgccctgctgccgaccgaggactgaccactcgaccaggttctgggttgacaaatatcaagacggaggagatctctgaagtgaagatggatgcagaattccgacatgactcaggatatgaagttcatcatcaaaaattggtgttctttgcagaagatgtgggttcaaacaaaggtgcaatcattggactcatggtgggcggtgttgtcatagcgacagtgatcgtcatcaccttggtgatgctgaagaagaaacagtacacatccattcatcatggtgtggtggaggttgacgccgctgtcaccccagaggagcgccacctgtccaagatgcagcagaacggctacgaaaatccaacctacaagttctttgagcagatgcagaactagacccccgccacagcagcctctgaagttggacagcaaaaccattgcttcactacccatcggtgtccatttatagaataatgtgggaagaaacaaacccgttttatgatttactcattatcgccttttgacagctgtgctgtaacacaagtagatgcctgaacttgaattaatccacacatcagtaatgtattctatctctctttacattttggtctctatactacattattaatgggttttgtgtactgtaaagaatttagctgtatcaaactagtgcatgaatagattctctcctgattatttatcacatagccccttagccagttgtatattattcttgtggtttgtgacccaattaagtcctactttacatatgctttaagaatcgatgggggatgcttcatgtgaacgtgggagttcagctgcttctcttgcctaagtattcctttcctgatcactatgcattttaaagttaaacatttttaagtatttcagatgctttagagagattttttttccatgactgcattttactgtacagattgctgcttctgctatatttgtgatataggaattaagaggatacacacgtttgtttcttcgtgcctgttttatgtgcacacattaggcattgagacttcaagcttttctttttttgtccacgtatctttgggtctttgataaagaaaagaatccctgttcattgtaagcacttttacggggcgggtggggaggggtgctctgctggtcttcaattaccaagaattctccaaaacaattttctgcaggatgattgtacagaatcattgcttatgacatgatcgctttctacactgtattacataaataaattaaataaaataaccccgggcaagacttttctttgaaggatgactacagacattaaataatcgaagtaattttgggtggggagaagaggcagattcaattttctttaaccagtctgaagtttcatttatgatacaaaagaagatgaaaatggaagtggcaatataaggggatgaggaaggcatgcctggacaaacccttcttttaagatgtgtcttcaatttgtataaaatggtgttttcatgtaaataaatacattcttggaggagc

SEQ ID NO: 119 - DNA, 2921 bp, Homo sapiens
agcctgtggagacgggacagccctgtcccactcactctttcccctgccgctcctgccggcagctccaaccatgggaggccgcgtctttctcgcattctgtgtctggctgactctgccgggagctgaaacccaggactccaggggctgtgcccggtggtgccctcagaactcctcgtgtgtcaatgccaccgcctgtcgctgcaatccagggttcagctctttttctgagatcatcaccaccccgacggagacttgtgacgacatcaacgagtgtgcaacaccgtcgaaagtgtcatgcggaaaattctcggactgctggaacacagaggggagctacgactgcgtgtgcagcccgggatatgagcctgtttctggggcaaaaacattcaagaatgagagcgagaacacctgtcaagatgtggacgagtgcagctccgggcagcatcagtgtgacagctccaccgtctgcttcaacaccgtgggttcatacagctgccgctgccgcccaggctggaagcccagacacggaatcccgaataaccaaaaggacactgtctgtgaagatatgactttctccacctggaccccgccccctggagtccacagccagacgctttcccgattcttcgacaaagtccaggacctgggcagagactccaagacaagctcagccgaggtcaccatccagaatgtcatcaaattggtggatgaactgatggaagctcctggagacgtagaggccctggcgccacctgtccggcacctcatagccacccagctgctctcaaaccttgaagatatcatgaggatcctggccaagagcctgcctaaaggccccttcacctacatttccccttcgaacacagagctgaccctgatgatccaggagcggggggacaagaacgtcactatgggtcagagcagcgcacgcatgaagctgaattgggctgtggcagctggagccgaggatccaggccccgccgtggcgggcatcctctccatccagaacatgacgacattgctggccaatgcctccttgaacctgcattccaagaagcaagccgaactggaggagatatatgaaagcagcatccgtggtgtccaactcagacgcctctctgccgtcaactccatctttctgagccacaacaacaccaaggaactcaactcccccatccttttcgccttctcccaccttgagtcctccgatggggaggcgggaagagaccctcctgccaaggacgtgatgcctgggccacggcaggagctgctctgtgccttctggaagagtgacagcgacaggggagggcactgggccaccgagggctgccaggtgctgggcagcaagaacggcagcaccacctgccaatgcagccacctgagcagctttgcgatccttatggctcattatgacgtggaggactggaagctgaccctgatcaccagggtgggactggcgctgtcactcttctgcctgctgctgtgcatcctcactttcctgctggtgcggcccatccagggctcgcgcaccaccatacacctgcacctctgcatctgcctcttcgtgggctccaccatcttcctggccggcatcgagaacgaaggcggccaggtggggctgcgctgccgcctggtggccgggctgctgcactactgtttcctggccgccttctgctggatgagcctcgaaggcctggagctctactttcttgtggtgcgcgtgttccaaggccagggcctgagtacgcgctggctctgcctgatcggctatggcgtgcccctgctcatcgtgggcgtctcggctgccatctacagcaagggctacggccgccccagatactgctggttggactttgagcagggcttcctctggagcttcttgggacctgtgaccttcatcattttgtgcaatgctgtcattttcgtgactaccgtctggaagctcactcagaagttttctgaaatcaatccagacatgaagaaattaaagaaggcgagggcgctgaccatcacggccatcgcgcagctcttcctgttgggctgcacctgggtctttggcctgttcatcttcgacgatcggagcttggtgctgacctatgtgtttaccatcctcaactgcctgcagggcgccttcctctacctgctgcactgcctgctcaacaagaaggttcgggaagaataccggaagtgggcctgcctagttgctggggggagcaagtactcagaattcacctccaccacgtctggcactggccacaatcagacccgggccctcagggcatcagagtccggcatatgaaggcgcatggttctggacggcccagcagctcctgtggccacagcagctttgtacacgaagaccatccatcctcccttcgtccaccactctactccctccaccctccctccctgatcccgtgtgccaccaggagggagtggcagctatagtctggcaccaaagtccaggacacccagtggggtggagtcggagccactggtcctgctgctggctgcctctctgctccaccttgtgacccagggtggggacaggggctggcccagggctgcaatgcagcatgttgccctggcacctgtggccagtactcgggacagactaagggcgcttgtcccatcctggacttttcctctcatgtctttgctgcagaactgaagagactaggcgctggggctcagcttccctcttaagctaagactgatgtcagaggccccatggcgaggccccttggggccactgcctgaggctcacggtacagaggcctgccctgcctggccgggcaggaggttctcactgttgtgaaggttgtagacgttgtgtaatgtgtttttatctgttaaaatttttcagtgttgacacttaaaattaaacacatgcatacagaaaaaaaaaaaaaaaaaaaaaa

SEQ ID NO: 120 - protein, 362 aa, Homo sapiens [sequence omitted]

SEQ ID NO: 121 - DNA, 1918 bp, Homo sapiens
aagtctacatgaaaaggatggtttcttggagcttccacaaacttaaaaccatgaaacatctattattgctactattgtgtgtttttctagttaagtcccaaggtgtcaacgacaatgaggagggtttcttcagtgcccgtggtcatcgaccccttgacaagaagagagaagaggctcccagcctgaggcctgccccaccgcccatcagtggaggtggctatcgggctcgtccagccaaagcagctgccactcaaaagaaagtagaaagaaaagcccctgatgctggaggctgtcttcacgctgacccagacctgggggtgttgtgtcctacaggatgtcagttgcaagaggctttgctacaacaggaaaggccaatcagaaatagtgttgatgagttaaataacaatgtggaagctgtttcccagacctcctcttcttcctttcagtacatgtatttgctgaaagacctgtggcaaaagaggcagaagcaagtaaaagataatgaaaatgtagtcaatgagtactcctcagaactggaaaagcaccaattatatatagatgagactgtgaatagcaatatcgcaactaaccttcgtgtgcttcgttcaatcctagaaaacctgagaagcaaaatacaaaagttagaatctgatgtctcagctcaaatggaatattgtcgcaccccatgcactgtcagttgcaatattcctgtggtgtctggcaaagaatgtgaggaaattatcaggaaaggaggtgaaacatctgaaatgtatctcattcaacctgacagttctgtcaaaccgtatagagtatactgtgacatgaatacagaaaatggaggatggacagtgattcagaaccgtcaagacggtagtgttgactttggcaggaaatgggatccatataaacagggatttggaaatgttgcaaccaacacagatgggaagaattactgtggcctaccaggtgaatattggcttggaaatgataaaattagccagcttaccaggatgggacccacagaacttttgatagaaatggaggactggaaaggagacaaagtaaaggctcactatggaggattcactgtacagaatgaagccaacaaataccagatctcagtgaacaaatacagaggaacagccggtaatgccctcatggatggagcatctcagctgatgggagaaaacaggaccatgaccattcacaacggcatgttcttcagcacgtatgacagagacaatgacggctggttaacatcagatcccagaaaacagtgttctaaagaagacggtggtggatggtggtataatagatgtcatgcagccaatccaaacggcagatactactggggtggacagtacacctgggacatggcaaagcatggcacagatgatggtgtagtatggatgaattggaaggggtcatggtactcaatgaggaagatgagtatgaagatcaggcccttcttcccacagcaatagtccccaatacgtagatttttgctcttctgtatgtgacaacatttttgtacattatgttattggaattttctttcatacattatattcctctaaaactctcaagcagacgtgagtgtgactttttgaaaaaagtataggataaattacattaaaatagcacatgattttcttttgttttcttcatttctcttgctcaccaagaagtaacaaaagtatagttttgacagagttggtgttcataatttcagttctagttgattgcgagaattttcaaataaggaagaggggtcttttatccttgtcgtaggaaaaccatgacggaaaggaaaaactgatgtttaaaagtccacttttaaaactatatttatttatgtaggatctgtcaaagaaaacttccaaaaagatttattaattaaaccagactctgttgcaat

SEQ ID NO: 122 - DNA, 3714 bp, Homo sapiens
ggcacgagggatcggcggagctcccacctccgcttacagctcgctgccgccgtcctgccccgcgcccccaggagacctggaccagaccacgatgtggaaacgctggctcgcgctcgcgctcgcgctggtggcggtcgcctgggtccgcgccgaggaagagctaaggagcaaatccaagatctgtgccaatgtgttttgtggagccggccgggaatgtgcagtcacagagaaaggggaacccacctgtctctgcattgagcaatgcaaacctcacaagaggcctgtgtgtggcagtaatggcaagacctacctcaaccactgtgaactgcatcgagatgcctgcctcactggatccaaaatccaggttgattacgatggacactgcaaagagaagaaatccgtaagtccatctgccagcccagttgtttgctatcagtccaaccgtgatgagctccgacgtcgcatcatccagtggctggaagctgagatcattccagatggctggttctctaaaggcagcaactacagtgaaatcctagacaagtattttaagaactttgataatggtgattctcgcctggactccagtgaattcctgaagtttgtggaacagaatgaaactgccatcaatattacaacgtatccagaccaggagaacaacaagttgcttaggggactctgtgttgatgctctcattgaactgtctgatgaaaatgctgattggaaactcagcttccaagagtttctcaagtgcctcaacccatctttcaaccctcctgagaagaagtgtgccctggaggatgaaacgtatgcagatggagctgagaccgaggtggactgtaaccgctgtgtctgtgcctgtggaaattgggtctgtacagccatgacctgtgacggaaagaatcagaagggggcccagacccagacagaggaggagatgaccagatatgtccaggagctccaaaagcatcaggaaacagctgaaaagaccaagagagtgagcaccaaagagatctaatgaggaggcacagaccagtgtctggatcccagcatcttctccacttcagcgctgagttcagtatacacaagtgtctgctacagtcgccaaatcaccagtatttgcttatatagcaatgagttttattttgtttatttgttttgcaataaaggatatgaaggtggctggctaggaagggaagggccacagccttcatttctaggagtgctttaagagaaactgtaaatggtgctctggggctggaggctagtaaggaaactgcatcacgattgaaagaggaacagacccaaatctgaacctcttttgagtttactgcatctgtcagcaggctgcagggagtgcacacgatgccagagagaacttagcagggtgtccccggaggagaggtttgggaagctccacggagaggaacgctctctgcttccagcctctttccattgccgtcagcatgacagacctccagcatccacgcatctcttggtcccaataactgcctctagatacatagccatactgctagttaacccagtgtccctcagacttggatggagtttctgggagggtacacccaaatgatgcagatacttgtatactttgagccccttagcgacctaaccaaattttaaaaatactttttaccaaaggtgctatttctctgtaaaacactttttttttggcaagttgactttattcttcaattattatcattatattattgttttttaatattttattttcttgactaggtattaagcttttgtaattatttttcagtagtcccaccacttcataggtggaaggagtttggggttcttcctggtgcaggggctgaaataacccagatgcccccaccctgccacatactagatgcagcccatagttggcccccctagcttccagcagtccactatctgccagaggagcaagggtgccttagaccgaagccaggggaagaagcatcttcataaaaaactttcaagatccaaacattaatttgtttttatttattctgagaagttgaggcaaatcagtattcccaaggatggcgacaagggcagccaagcagggcttaggatatcccagcctaccaatatgctcattcgactaactaggagggtgagttggccctgtctcttcttttttctggacctcagtttcctcagtgagctggtaagaatgcactaaccttttgatttgataagttataaattctgtggttctgatcattggtccagaggggagataggttcctgtgatttttccttcttctctatagaataaatgaaatcttgttactagaacaagaaatgtcagatggccaaaaacaagatgaccagatttgatctcagcctgatgaccctacaggtcgtgctatgatatggagtcctcatgggtaaagcaggaagagagtgggaaagagaaccaccccactctgtcttcatatttgcatttcatgtttaacctccggctggaaatagaaagcattcccttagagatgaggataaaagaaagtttcagattcaacagggggaagaaaatggagatttaatcctaaaactgtgacttggggaggtcagtcatttacagttagtcctgtgtctttcgacttctgtgattattaaccccactcactaccctgtttcagatgcatttggaataccaaagattaaatccttgacataagatctcatttgcagaaagcagattaaagaccatcagaaggaaattatttaggttgtaatgcacaggcaactgtgagaaactgttgtgccaaaaatagaattccttctagtttttcttgttctcatttgaaaggagaaaattccactttgtttagcatttcaagcttttatgtatccatcccatctaaaaactcttcaaactccacttgttcagtctgaaatgcagctccctgtccaagtgccttggagaactcacagcagcacgccttaatcaaaggttttaccagcccttggacactatgggaggagggcaagagtacaccaatttgttaaaagcaagaaaccacagtgtctcttcactagtcatttagaacatggttatcatccaagactactctaccctgcaacattgaactcccaagagcaaatccacattcctcttgagttctgcagcttctgtgtaaatagggcagctgtcgtctatgccgtagaatcacatgatctgaggaccattcatggaagctgctaaatagcctagtctggggagtcttccataaagttttgcatggagcaaacaaacaggattaaactaggtttggttccttcagccctctaaaagcatagggcttagcctgcaggcttccttgggctttctctgtgtgtgtagttttgtaaacactatagcatctgttaagatccagtgtccatggaaacattcccacatgccgtgactctggactatatcagtttttggaaagcagggttcctctgcctgctaacaagcccacgtggaccagtctgaatgtctttcctttacacctatgtttttaagtagtcaaacttcaagaaacaatctaaacaagtttctgttgcatatgtgtttgtgaacttgtatttgtatttagtaggcttctatattgcatttaacttgtttttgtaactcctgattcttccttttcggatactattgatgaataaagaaattaaagtgaaaaaaaaaaaaaaaaaaaaaaa

SEQ ID NO: 123 - DNA, 1982 bp, Homo sapiens
gcagaggaggagcgcacgccggcctcgaagaacttctgcttgggtggctgaactctgatcttgacctagagtcatggccatggcaaccaaaggaggtactgtcaaagctgcttcaggattcaatgccatggaagatgcccagaccctgaggaaggccatgaaagggctcggcaccgatgaagacgccattattagcgtccttgcctaccgcaacaccgcccagcgccaggagatcaggacagcctacaagagcaccatcggcagggacttgatagacgacctgaagtcagaactgagtggcaacttcgagcaggtgattgtggggatgatgacgcccacggtgctgtatgacgtgcaagagctgcgaagggccatgaagggagccggcactgatgagggctgcctaattgagatcctggcctcccggacccctgaggagatccggcgcataagccaaacctaccagcagcaatatggacggagccttgaagatgacattcgctctgacacatcgttcatgttccagcgagtgctggtgtctctgtcagctggtgggagggatgaaggaaattatctggacgatgctctcgtgagacaggatgcccaggacctgtatgaggctggagagaagaaatgggggacagatgaggtgaaatttctaactgttctctgttcccggaaccgaaatcacctgttgcatgtgtttgatgaatacaaaaggatatcacagaaggatattgaacagagtattaaatctgaaacatctggtagctttgaagatgctctgctggctatagtaaagtgcatgaggaacaaatctgcatattttgctgaaaagctctataaatcgatgaagggcttgggcaccgatgataacaccctcatcagagtgatggtttctcgagcagaaattgacatgttggatatccgggcacacttcaagagactctatggaaagtctctgtactcgttcatcaagggtgacacatctggagactacaggaaagtactgcttgttctctgtggaggagatgattaaaataaaaatcccagaaggacaggaggattctcaacactttgaatttttttaacttcatttttctacactgctattatcattatctcagaatgcttatttccaattaaaacgcctacagctgcctcctagaatatagactgtctgtattattattcacctataattagtcattatgatgctttaaagctgtacttgcatttcaaagcttataagatataaatggagattttaaagtagaaataaatatgtattccatgtttttaaaagattactttctactttgtgtttcacagacattgaatatattaaattattccatattttcttttcagtgaaaaattttttaaatggaagactgttctaaaatcacttttttccctaatccaatttttagagtggctagtagtttcttcatttgaaattgtaagcatccggtcagtaagaatgcccatccagttttctatatttcatagtcaaagccttgaaagcatctacaaatctctttttttaggttttgtccatagcatcagttgatccttactaagtttttcatgggagacttccttcatcacatcttatgttgaaatcactttctgtagtcaaagtataccaaaaccaatttatctgaactaaattctaaagtatggttatacaaaccatatacatctggttaccaaacataaatgctgaacattccatattattatagttaatgtcttaatccagcttgcaagtgaatggaaaaaaaaataagcttcaaactaggtattctgggaatgatgtaatgctctgaatttagtatgatataaagaaaacttttttgtgctaaaaatactttttaaaatcaattttgttgattgtagtaatttctatttgcactgtgcctttcaactccagaaacattctaagatgtacttggatttaattaaaaagttcactttgt

SEQ ID NO: 124 - DNA, 3149 bp, Homo sapiens
gacatggcggcggcgccggtagcggctgggtctggagccggccgagggagacggtcggcagccacagtggcggcttggggcggatggggcggccggccgcggcctggtaacattctgctgcagctgcggcagggccagctgaccggccggggcctggtccgggcggtgcagttcactgagacttttttgacggagagggacaaacaatccaagtggagtggaattcctcagctgctcctcaagctgcacaccaccagccacctccacagtgactttgttgagtgtcaaaacatcctcaaggaaatttctcctcttctctccatggaggctatggcatttgttactgaagagaggaaacttacccaagaaaccacttatccaaatacttatatttttgacttgtttggaggtgttgatcttcttgtagaaattcttatgaggcctacgatctctatccggggacagaaactgaaaataagtgatgaaatgtccaaggactgcttgagtatcctgtataatacctgtgtctgtacagagggagttacaaagcgtttggcagaaaagaatgactttgtgatcttcctgtttacattgatgacaagtaagaagacattcttacaaacagcaaccctcattgaagatattttgggtgttaaaaaggaaatgatccgactagatgaagtccccaatctgagttccttagtatccaatttcgatcagcagcagctcgctaatttctgccggattctggctgtcaccatttcagagatggatacagggaatgatgacaagcacacgcttcttgccaaaaatgctcaacagaagaagagcttgagtttggggccttctgcagctgaaatcaatcaagcggcccttctcagcattcctggctttgttgagcggctttgcaaactggcgactcgaaaggtgtcagagtcaacgggcacagccagcttccttcaggagttggaagagtggtacacatggctagacaatgctttggtgctagatgccctgatgcgagtggccaatgaggagtcagagcacaatcaagcctccattgtgttccctcctccaggggcttctgaggagaatggcctgcctcacacgtcagccagaacccagctgccccagtcaatgaagattatgcatgagatcatgtacaaactggaagtgctctatgtcctctgcgtgctgctgatggggcgtcagcgaaaccaggttcacagaatgattgcagagttcaagctgatccctggacttaataatttgtttgacaaactgatttggaggaagcattcagcatctgcccttgtcctccatggtcacaaccagaactgtgactgtagcccggacatcaccttgaagatacagtttttgaggcttcttcagagcttcagtgaccaccacgagaacaagtacttgttactcaacaaccaggagctgaatgaactcagtgccatctctctcaaggccaacatccctgaggtggaagctgtcctcaacaccgacaggagtttggtgtgtgatgggaagaggggcttattaactcgtctgctgcaggtcatgaagaaggagccagcagagtcgtctttcaggttttggcaagctcgggctgtggagagtttcctccgagggaccacctcctatgcagaccagatgttcctgctgaagcgaggcctcttggagcacatcctttactgcattgtggacagcgagtgtaagtcaagggatgtgctccagagttactttgacctcctgggggagctgatgaagttcaacgttgatgcattcaagagattcaataaatatatcaacaccgatgcaaagttccaggtattcctgaagcagatcaacagctccctggtggactccaacatgctggtgcgctgtgtcactctgtccctggaccgatttgaaaaccaggtggatatgaaagttgccgaggtactgtctgaatgccgcctgctcgcctacatatcccaggtgcccacgcagatgtccttcctcttccgcctcatcaacatcatccacgtgcagacgctgacccaggagaacgtcagctgcctcaacaccagcctggtgatcctgatgctggcccgacggaaagagcggctgcccctgtacctgcggctgctgcagcggatggagcacagcaagaagtaccccggcttcctgctcaacaacttccacaacctgctgcgcttctggcagcagcactacctgcacaaggacaaggacagcacctgcctagagaacagctcctgcatcagcttctcatactggaaggagacagtgtccatcctgttgaacccggaccggcagtcaccctctgctctcgttagctacattgaggagccctacatggacatagacagggacttcactgaggagtgaccttgggccaggcctcgggaggctgctgggccagtgtgggtgagcgtgggtacgatgccacacgccctgccctgttcccgttcctccctgctgctctctgcctgccccaggtctttgggtacaggcttggtgggagggaagtcctagaagcccttggtccccctgggtctgagggccctaggtcatggagagcctcagtccccataatgaggacagggtaccatgcccacctttccttcagaaccctggggcccagggccacccagaggtaagaggacatttagcattagctctgtgtgagctcctgccggtttcttggctgtcagtcagtcccagagtggggaggaagatatgggtgacccccaccccccatctgtgagccaagcctcccttgtccctggcctttggacccaggcaaaggcttctgagccctgggcaggggtggtgggtaccagagaatgctgccttcccccaagcctgcccctctgcctcattttcctgtagctcctctggttctgtttgctcattggctgctgtgttcatccaagggggttctcccagaagtgaggggcctttccctccatcccttgaggcacggggcagctgtgcctgccctgcctctgcctgaggcagccgctcctgcctgagcctggacatggggcccttccttgtgttgccaatttattaacagcaaataaaccaattaaatggagactattaaataactttattttaaaaaaaaaaaaaaaaaa

SEQ ID NO: 125 - DNA, 3322 bp, Homo sapiens
gaaagctgtatttgctgcacgtggaaatctccgttattttccagcacccaacagtagcgtaatgggagtaacggacttaacctcatttctctttcagagcatttagccttcatatgcccttccctgcatgcttcccccaggccgtcaagacttgagttctgcctcgcttcccggcgcggtcgcagccctcagcccacttaggataatggcgacagctgaggtactgaacattggtaaaaaattatatgagggtaaaacaaaagaagtctacgaattgttagacagtccaggaaaagtcctcctgcagtccaaggaccagattacagcaggaaatgcagctagaaaaaaccacctggaaggaaaagctgcaatctcaaataaaatcaccagttgtatttttcagttattacaggaagcaggtattaaaactgccttcaccagaaaatgtggggagacagctttcattgcaccgcagtgtgaaatgattccaattgaatgggtttgcagaagaatagcaactggttcttttctcaaaagaaatcctggtgtcaaggaaggatataagttttacccacctaaagtggagttgtttttcaaggatgatgccaataatgacccacagtggtctgaggaacagctgattgctgcaaaattttgctttgctggacttcttataggccagactgaagtggatatcatgagtcatgctacacaggctatatttgaaatactggagaaatcctggttgccccagaattgtacactggttgatatgaagattgaatttggtgttgatgtaaccaccaaagaaattgttcttgctgatgttattgacaatgattcctggagactctggccatcaggagatcgaagccaacagaaagacaaacagtcttatcgggacctcaaagaagtaactcctgaagggctccaaatggtaaagaaaaactttgagtgggttgcagagagagtagagttgcttttgaaatcagaaagtcagtgcagggttgtagtgttgatgggctctacttctgatcttggtcactgtgaaaaaatcaagaaggcctgtggaaattttggcattccatgtgaacttcgagtaacatctgcgcataaaggaccagatgaaactctgaggattaaagctgagtatgaaggggatggcattcctactgtatttgtggcagtggcaggcagaagtaatggtttgggaccagtgatgtctgggaacactgcatatccagttatcagctgtcctcccctcacaccagactggggagttcaggatgtgtggtcttctcttcgactacccagtggtcttggctgttcaaccgtactttctccagaaggatcagctcaatttgctgctcagatatttgggttaagcaaccatttggtatggagcaaactgcgagcaagcattttgaacacatggatttccttgaagcaggctgacaagaaaatcagagaatgtaatttataagaaagaatgccattgaattttttaggggaaaaactacaaatttctaatttagctgaaggaaaatcaagcaagatgaaaaggtaattttaaattagagaacacaaataaaatgtattagtgaataaatgcttctctagatccatattaataaacatgagcatctaacccctcctttcttaggctagacaccaagatatttcagccagcctttatcattcctcttactttatcctttttccttaagtattggtggtcactactattgagtttcttccttaacactgattaaatgatcttaactccctcagctaaaactggcattactgactcccagctatatttctccagacttgcatttttttttttttttttgagacagggtctcactgtcgcccaggctggagtgcagtggcgtgatctcagttcactgctgctttccctcctgggctcaagcagttctcccacctcagcctctcgactaacagggactataatcttgcagcaccatgccgagctaattttattttttgtagagatgagctctcactatgtcacccaggttcgtctcaaactcctgaaccctagtaattctcctatctcagcctcccaaagtgctagggttacagacatgagccactgtgcctgtctagacttgtactttcaactgtccatttctccctgtctgtcccatgggcactcatgaaaaaacagaatgctcccaactttattcatcttccaagcctgtagctcttggtatactcactgttgcaagtcagaagcttgatttcatcattgatgtttttctcacgtttcacatctcactcatcaccaagtcatgttggtgttaatttctgattaacccttgaatttaccgtcttctcatcctctgtacaaaagcctcaagtgagggtcaaattcaacattatcctgatctagacagcccccattctcaatccacccttttccaagttgattgcccaaggacttctaacaataaactctcttttgcaccacagacttctttgaaaatatacatgctgttgaccctctctgtagaaaaccgcacacataaaacttaccaacagatttcattggttcttgggttctcccgaagcctatccatggtttatagattaagaattgatgaggtagctgggcacagtggctcacacctacgatcacagcacttcgggaggctgaagcaagcagatcacttgaggtcaggagtttgagaccagcctggccaacatggtgaaaccctgtctctactaaaaatacaaaaagtagccagccgtgatgacaggcacctgtaatcccagctactcgggaggctgaggcatgagaattgcttgaacccgggaggcggaggttgcagtgagcctggatcatgccactgcactccaacctgggcagcagagcaagactctgtctcaaaaggggaaaaaaaaaattgctgatgtgacccatgaagggaactcattttcctcgtaattttggactgccacacattggtacctttagttctctgaaggcccacgtttttatcattaagacctatttgttagctagtagagctttatgttcgctgtccatgaaaccttctgtaaccacagtgactacaagtagttctttctctattgaattattaggtccagaatagaagatgtcattgtacactttatttccctcacactgtgttatgctctgatgtgctatgcttagctatctgtcagagattagtaaattataaaactcatgtgtactacttaagtttatatcttatgctagtttataagaacaattaaaaggacttagaagattaaaaaaaaaaaaaaaaaa

SEQ ID NO: 126 - DNA, 2205 bp, Homo sapiens
atgtgggggctcctgctcgccctggccgccttcgcgccggccgtcggcccggctctgggggcgcccaggaactcggtgctgggcctcgcgcagcccgggaccaccaaggtcccaggctcgaccccggccctgcatagcagcccggcacagccgccggcggagacagctaacgggacctcagaacagcatgtccggattcgagtcatcaagaagaaaaaggtcattatgaagaagcggaagaagctaactctaactcgccccaccccactggtgactgccgggccccttgtgacccccactccagcagggaccctcgaccccgctgagaaacaagaaacaggctgtcctcctttgggtctggagtccctgcgagtttcagatagccggcttgaggcatccagcagccagtcctttggtcttggaccacaccgaggacggctcaacattcagtcaggcctggaggacggcgatctatatgatggagcctggtgtgctgaggagcaggacgccgatccatggtttcaggtggacgctgggcaccccacccgcttctcgggtgttatcacacagggcaggaactctgtctggaggtatgactgggtcacatcatacaaggtccagttcagcaatgacagtcggacctggtggggaagtaggaaccacagcagtgggatggacgcagtatttcctgccaattcagacccagaaactccagtgctgaacctcctgccggagccccaggtggcccgcttcattcgcctgctgccccagacctggctccagggaggcgcgccttgcctccgggcagagatcctggcctgcccagtctcagaccccaatgacctattccttgaggcccctgcgtcgggatcctctgaccctctagactttcagcatcacaattacaaggccatgaggaagctgatgaagcaggtacaagagcaatgccccaacatcacccgcatctacagcattgggaagagctaccagggcctgaagctgtatgtgatggaaatgtcggacaagcctggggagcatgagctgggggagcctgaggtgcgctacgtggctggcatgcatgggaacgaggccctggggcgggagttgcttctgctcctgatgcagttcctgtgccatgagttcctgcgagggaacccacgggtgacccggctgctctctgagatgcgcattcacctgctgccctccatgaaccctgatggctatgagatcgcctaccaccggggttcagagctggtgggctgggccgagggccgctggaacaaccagagcatcgatcttaaccataattttgctgacctcaacacaccactgtgggaagcacaggacgatgggaaggtgccccacatcgtccccaaccatcacctgccattgcccacttactacaccctgcccaatgccaccgtggctcctgaaacgcgggcagtaatcaagtggatgaagcggatcccctttgtgctaagtgccaacctccacgggggtgagctcgtggtgtcctacccattcgacatgactcgcaccccgtgggctgcccgcgagctcacgcccacaccagatgatgctgtgtttcgctggctcagcactgtctatgctggcagtaatctggccatgcaggacaccagccgccgaccctgccacagccaggacttctccgtgcacggcaacatcatcaacggggctgactggcacacggtccccgggagcatgaatgacttcagctacctacacaccaactgctttgaggtcactgtggagctgtcctgtgacaagttccctcacgagaatgaattgccccaggagtgggagaacaacaaagacgccctcctcacctacctggagcaggtgcgcatgggcattgcaggagtggtgagggacaaggacacggagcttgggattgctgacgctgtcattgccgtggatgggattaaccatgacgtgaccacggcgtggggcggggattattggcgtctgctgaccccaggggactacatggtgactgccagtgccgagggctaccattcagtgacacggaactgtcgggtcacctttgaagagggccccttcccctgcaatttcgtgctcaccaagactcccaaacagaggctgcgcgagctgctggcagctggggccaaggtgcccccggaccttcgcaggcgcctggagcggctaaggggacagaaggattga

SEQ ID NO: 127 - DNA, 5431 bp, Homo sapiens
ggcagccgggcgccccgcggggctctccgcgctgcgttcccgacccctggggggaggtgtggagtccaagcggtgcattcttgaaccatcttgtcagacgccggcggctcgcgggctgtggcgggggctgcggtcaaggccgcgctcctgggggccgccgcctgggagggtgggcgcccaggcgtccctgcagccccgggtgctccgactgcgcggcggggccgcggcgcgcgcgcccgggcgtccgggcgtccgggacagtggtgccagacactcccaaatcccgagccggcccagcctcgtacggaggaccttttttttggttctgttggtgacccgttagccgccgctggggcctaacaccaagttgagggctcgcggattagccgcccgccagccgtggaaatgtgataagagcggtaccgtttgcagaaggaaatttctgatgcaactcttcgcctttgctgattgcctctccaaacgcctgcctgacgactgccttggagcatgtgcgttatggaaattaggctttggcgctgaccacaatgctgagcaggaagcagcagctgcaggcccagtgactggtagctcagtgaccagcagcccagtgaccggcagccaggtcctcacctgggtcctctcagtgaagccagggtggccgccccagcagacagtgctacagagccaactcctgacaggttctgaaaatattgtgcacagggcaggctgaggacacagccacgtgatacccactgtagagagagggagagagagacctcctatgcaagctgccggccctctgttccgtagtaaggacaaggtggagcagacacctcgcagtcaacaagacccggcaggaccaggactccccgcacagtctgaccgacttgcgaatcaccaggaggatgatgtggacctggaagccctggtgaacgatatgaatgcatccctggagagcctgtactcggcctgcagcatgcagtcagacacggtgcccctcctgcagaatggccagcatgcccgcagccagcctcgggcttcaggccctcctcggtccatccagccacaggtgtccccgaggcagagggtgcagcgctcccagcctgtgcacatcctcgctgtcaggcgccttcaggaggaagaccagcagtttagaacctcatctctgccggccatccccaatccttttcctgaactctgtggccctgggagccccgctgtgctcacgccgggttctttacctccgagccaggccgccgcaaagcaggatgttaaagtctttagtgaagatgggacaagcaaagtggtggagattctagcagacatgacagccagagacctgtgccaattgctggtttacaaaagtcactgtgtggatgacaacagctggacactagtggagcaccacccgcacctaggattagagaggtgcttggaagaccatgagctggtggtccaggtggagagtaccatggccagtgagagtaaatttctattcaggaagaattacgcaaaatacgagttctttaaaaatcccatgaatttcttcccagaacagatggttacttggtgccagcagtcaaatggcagtcaaacccagcttttgcagaattttctgaactccagtagttgtcctgaaattcaagggtttttgcatgtgaaagagctgggaaagaaatcatggaaaaagctgtatgtgtgtttgcggagatctggcctttattgctccaccaagggaacttcaaaggaacccagacacctgcagctgctggccgacctggaggacagcaacatcttctccctgatcgctggcaggaagcagtacaacgcccctacagaccacgggctctgcataaagccaaacaaagtcaggaatgaaactaaagagctgaggttgctctgtgcagaggacgagcaaaccaggacgtgctggatgacagcgttcagactcctcaagtatggaatgctcctttaccagaattaccgaatccctcagcagaggaaggccttgctgtccccgttctcgacgccagtgcgcagtgtctccgagaactccctcgtggcaatggatttttctgggcaaacaggacgcgtgatagagaatccggcggaggcccagagcgcagccctggaggagggccacgcctggaggaagcgaagcacacggatgaacatcctaggtagccaaagtcccctccacccttctaccctaagtacagtgattcacaggacacagcactggtttcacgggaggatctccagggaggaatcccacaggatcattaaacagcaagggctcgtggatgggctttttctcctccgtgacagccagagtaatccaaaggcatttgtactcacactgtgtcatcaccagaaaattaaaaatttccagatcttaccttgcgaggacgacgggcagacgttcttcagcctagatgacgggaacaccaaattctctgacctgatccagctggttgacttttaccagctgaacaaaggagtcctgccttgcaaactcaagcaccactgcatccgagtggccttatgaccgcagatgtcctctcggctgaagactggaggaagtgaacactggagtgaagaagcggtctgtgcgttggtgaagaacacacatcgattctgcacctggggacccagagcgagatgggtttgttcggtgccagccgaccaagattgactagtttgttggacttaaacgacgatttgctgctgtgaacccagcagggtcgcctccctctgcgtcagccaaattggggagggcatggaagatccagcggaaagttgaaaataaactggaatgatcatcttggcttgggccgcttaggaacaagaaccggagagaagtgattggaaatgaactcttgccctggaataatcttgacaattaaaactgatatgtttactttttttgtattgatcacttttttgcactccttctttgttttcaatattgtattcagcctattgtaggagggggatgtggcgtttcaactcatataatacagaaagagttttgaatgggcagatttcaaactgaatatgggtccccaaatgttcccagagggtcctccacaccctctgccgactaccacggtgtggattcagctcccaaatgacaaacccagcccttcccagtatacttgaaaagctttcttgttaaaataaaaggtgtcactgtggtaggcatttggcatattttgtggactcagtcaagcaaccacagtctgttaatcatttctctatgctcagatgtcagatcctcttgttattagtgtgtcttgttctgcacagtgcaggagactttattcctttggaaaattcactgttccacaaacagcaggctgaatggcctcgcctctagattgacgtgggccagcctccttgagacacacctggcacccgtcatcggccagcggtggatgctgcataatccacctgggtacttcagccttgcgtttccacagccttcagcctgttctagaacgatcactgccttacccctgctgctgcagtggtgtgagtcgtttcacggctgatgtccctcgggggattaaaggatctaaagagaaaatggcacctggttgtcttcgtgctgtgtctcatgggtttccatagtgataaagacaaggaaacgctgcaggggccacaggcacaggctgatatttaaagatctttgcttgcagccctccgtcctgctgaaaacccccataagccagtgaacacagagcagctagaggctcctcctctgctggcttagggtcagaagtacctcacagtggttgtggacatggaagagttttgtcaacacaacactttgtccccgctccgggagatgagtcagatggtggcttgagttgtcacttggtcccctccgcccctcgggtggccccctttgccacgtccccttagcttagtgatcaggtgtgagagtggccatttccttacctttgatccctgtaaagcagaaaggactcctttgacaggcgacaaactactgtggtgagcagaatgatttcctttttcaagacaacacctgcctggcttctattaatgtgtgctggccatgatattgccccaaatccgccccactgaagtgttccctaaggaacagcatttctctgctcctcagtcaacccccgtagcctagagcagtgtcacaagcttcagtaaggccagtcagctggaagtcagtctaccgtatagtaacactgtatttcagtctacagaccacactctagttgttttccatgaaaggtatacaaatgaagaattttctagcaaaacatgtttttaaccatcagtgctcaattgcattttcttcctttcgcagccagtcagtctttcaaactattgacagtaagataattctcacgttcacacctggtggcaggcttcactgtagggacggacattgcagttacaccacgattccttcctcttcactggctcgaggtaaacccttttcaaggaaaaacaactctaggatttcttttttctgtgtacgtagaccagtcccatcagtgtataatctctctctcacacgcctctctccaatagacagcttgtatttgcagtatttcatatttataaatatgcgtttatttaaaaggagaacaaaagcttgactctgattcacagttttgtatgtagctggtttgacgtagtcttttgtattttccctgccgaagtgaattgttggagaatgtaaaccgcctccacgtggcggcagacttcctaaggccccagctcgctggcctcgcgctgggcggctgggaattccacctgagaacaagtcccgcaaaccggggacggaaggacatttgacttttatttttgtatttaattgacatgaatgtaaaggggacagctcagggttgttttggagcctgttgactttgtatctctgcctgtgattttcttttctaaatgaaactccatgtagcaaccaggacgaagttgagaaggaaaacgccaaatgctttggttattagagtttaataggtaagctctgttacactaggtgttagagttccagaatgttcttttgtttgctaaaccttgaagaaacatgtgcctcagcctagatgttttgtcttctcttttctgcacttaatacctgacagtatgaccgatctctgcgcctttctgggggcgggcaagctggcggtagatttgtgatgtcacagtgcaaactgcagtgactgtaaattggcctggcgtgtataaacgttttcagggaatgcagaaggtattaatgaagagacaaaacctttattccatgtgctttgcttcattctgtacatagctctttggctcgtgaacctaattgtaaactttcaggtatttttgtacaaataagggactgatgttctgtttcttgtaattagaaataaacattaatacagtgttcttc

SEQ ID NO: 128 - DNA, 716 bp, Homo sapiens
ttctttctttgctgcgtctactgcgagaatgaagactattctcagcaatcagactgtcgacattccagaaaatgtcgacattactctgaagggacgcacagttatcgtgaagggccccagaggaaccctgcggagggacttcaatcacatcaatgtagaactcagccttcttggaaagaaaaaaaagaggctccgggttgacaaatggtggggtaacagaaaggaactggctaccgttcggactatttgtagtcatgtacagaacatgatcaagggtgttacactgggcttccgttacaagatgaggtctgtgtatgctcacttccccatcaacgttgttatccaggagaatgggtctcttgttgaaatccgaaatttcttgggtgaaaaatacatccgcagggttcggatgagaccaggtgttgcttgttcagtatctcaagcccagaaagatgaattaatccttgaaggaaatgacattgagcttgtttcaaattcagcggctttgattcagcaagccacaacagttaaaaacaaggatatcaggaaatttttggatggtatctatgtctctgaaaaaggaactgttcagcaggctgatgaataagatctaagagttacctggctacagaaagaagatgccagatgacacttaagacctacttgtgatatttaaatgatgcaataaaagacctattgatttggaccttcttctt

SEQ ID NO: 129 - DNA, 1414 bp, Homo sapiens
cgccaaccccacctagatgcaaagcaggattcaaaagaacatctttgcgttttctaccggctccccatcatcgtactagggaggaagaagcgggtgagaaacaaaacttctttccattgtcctgcccgtttctgcggacttgttctgaggccgaggcacctctaagatactgatggctctgcagaggacccattcattgcttctgcttttgctgctgaccctgctggggctggggctggtccagccctcctatggccaggatggcatgtaccagcgattcctgcggcaacacgtgcaccctgaggagacaggtggcagtgatcgctactgcaacttgatgatgcaaagacggaagatgactttgtatcactgcaagcgcttcaacaccttcatccatgaagatatctggaacattcgtagtatctgcagcaccaccaatatccaatgcaagaacggcaagatgaactgccatgagggtgtagtgaaggtcacagattgcagggacacaggaagttccagggcacccaactgcagatatcgggccatagcgagcactagacgtgttgtcattgcctgtgagggtaacccacaggtgcctgtgcactttgacggttagatgccaccatgtagggattatcgcgagtggttgaccttacacttactccttaaatagcagtgagtaatgcatttgagctgccccaggctctgtctcctcagctcatttcttactctttttctctatataactcattctattaaatacattgcaccaaagagatatggagacataaacctgtaatgaatgaggctgggcttttctgtaataagcttccttttataatactggtcagcttagctctctcagatcctatcctgtggaatttagttattatgtgtatttatgtagtatttcaaacatttcaaaatgctttcatctatgtttatcacattttaataccacagcacttataatgatgtcactacatatagaagctcaaagttaagggatttgctgaagactgtaaagttaatggaagaattgagacaaaaatccagtgtagctggccacttatccagggctttttctacttcatcacaaggaatgttttgaaagtgtctgctttttttatccttaaaattcacctgtcagggaggcattaaaaatttggaaatgtatgccagcaaaatgtgagctctgtattttttggcattcttatgtttgggtttaataagattaagaaaatgatactgggaattttctttttcctgaaactttgaatcaccctagtaagtcaaagtactaaaaaatgtactagatcattaagacttatgtgctcttactgattgaaagattttttatgttttccttgtaataaaggacctaaaccgaaggtacctgaaaaaaaaaaaaaaa

SEQ ID NO: 130 - DNA, 2619 bp, Homo sapiens
gactcctaggggcttgcagacctagtgggagagaaagaacatcgcagcagccaggcagaaccaggacaggtgaggtgcaggctggctttcctctcgcagcgcggtgtggagtcctgtcctgcctcagggcttttcggagcctggatcctcaaggaacaagtagacctggccgcggggagtggggagggaaggggtgtctattgggcaacagggcggcaaagccctgaataaaggggcgcagggcaggcgcaagtgcagagccttcgtttgccaagtcgcctccagaccgcagacatgaaacttgtcttcctcgtcctgctgttcctcggggccctcggactgtgtctggctggccgtaggagaaggagtgttcagtggtgcgccgtatcccaacccgaggccacaaaatgcttccaatggcaaaggaatatgagaaaagtgcgtggccctcctgtcagctgcataaagagagactcccccatccagtgtatccaggccattgcggaaaacagggccgatgctgtgacccttgatggtggtttcatatacgaggcaggcctggccccctacaaactgcgacctgtagcggcggaagtctacgggaccgaaagacagccacgaactcactattatgccgtggctgtggtgaagaagggcggcagctttcagctgaacgaactgcaaggtctgaagtcctgccacacaggccttcgcaggaccgctggatggaatgtccctacagggacacttcgtccattcttgaattggacgggtccacctgagcccattgaggcagctgtggccaggttcttctcagccagctgtgttcccggtgcagataaaggacagttccccaacctgtgtcgcctgtgtgcggggacaggggaaaacaaatgtgccttctcctcccaggaaccgtacttcagctactctggtgccttcaagtgtctgagagacggggctggagacgtggcttttatcagagagagcacagtgtttgaggacctgtcagacgaggctgaaagggacgagtatgagttactctgcccagacaacactcggaagccagtggacaagttcaaagactgccatctggcccgggtcccttctcatgccgttgtggcacgaagtgtgaatggcaaggaggatgccatctggaatcttctccgccaggcacaggaaaagtttggaaaggacaagtcaccgaaattccagctctttggctcccctagtgggcagaaagatctgctgttcaaggactctgccattgggttttcgagggtgcccccgaggatagattctgggctgtaccttggctccggctacttcactgccatccagaacttgaggaaaagtgaggaggaagtggctgcccggcgtgcgcgggtcgtgtggtgtgcggtgggcgagcaggagctgcgcaagtgtaaccagtggagtggcttgagcgaaggcagcgtgacctgctcctcggcctccaccacagaggactgcatcgccctggtgctgaaaggagaagctgatgccatgagtttggatggaggatatgtgtacactgcatgcaaatgtggtttggtgcctgtcctggcagagaactacaaatcccaacaaagcagtgaccctgatcctaactgtgtggatagacctgtggaaggatatcttgctgtggcggtggttaggagatcagacactagccttacctggaactctgtgaaaggcaagaagtcctgccacaccgccgtggacaggactgcaggctggaatatccccatgggcctgctcttcaaccagacgggctcctgcaaatttgatgaatatttcagtcaaagctgtgcccctgggtctgacccgagatctaatctctgtgctctgtgtattggcgacgagcagggtgagaataagtgcgtgcccaacagcaacgagagatactacggctacactggggctttccggtgcctggctgagaatgctggagacgttgcatttgtgaaagatgtcactgtcttgcagaacactgatggaaataacaatgaggcatgggctaaggatttgaagctggcagactttgcgctgctgtgcctcgatggcaaacggaagcctgtgactgaggctagaagctgccatcttgccatggccccgaatcatgccgtggtgtctcggatggataaggtggaacgcctgaaacaggtgctgctccaccaacaggctaaatttgggagaaatggatctgactgcccggacaagttttgcttattccagtctgaaaccaaaaaccttctgttcaatgacaacactgagtgtctggccagactccatggcaaaacaacatatgaaaaatatttgggaccacagtatgtcgcaggcattactaatctgaaaaagtgctcaacctcccccctcctggaagcctgtgaattcctcaggaagtaaaaccgaagaagatggcccagctccccaagaaagcctcagccattcactgcccccagctcttctccccaggtgtgttggggccttggctcccctgctgaaggtggggattgcccatccatctgcttacaattccctgctgtcgtcttagcaagaagtaaaatgagaaattttgttgatattcaaaaaaaa

SEQ ID NO: 131 - DNA, 2528 bp, Homo sapiens
gccacgtgtccggctcggagcccacggctgtcctcccggtccgcgccgctgcggttgctgctgggctaacgggctccgatccagcgagcgctgcgtcctcgagtccgcccgtgcgggcgcagggacccgaggcctccgctgcggctggattctgctgcgaaccggagaccatggccaaaccagcacagggtgccaagtaccggggctccatccatgacttcccaggctttgaccccaaccaggatgccgaggctctgtacactgccatgaagggctttggcagtgacaaggaggccatactggacataatcacctcacggagcaacaggcagaggcaggaggtctgccagagctacaagtccctctacggcaaggacctcattgctgatttaaagtatgaattgacgggcaagtttgaacggttgattgtgggcctgatgaggccacctgcctattgtgatgccaaagaaattaaagatgccatctcgggcattggcactgatgagaagtgcctcattgagatcttggcttcccggaccaatgagcagatgcaccagctggtggcagcatacaaagatgcctacgagcgggacctggaggctgacatcatcggcgacacctctggccacttccagaagatgcttgtggtcctgctccagggaaccagggaggaggatgacgtagtgagcgaggacctggtacaacaggatgtccaggacctatacgaggcaggggaactgaaatggggaacagatgaagcccagttcatttacatcttgggaaatcgcagcaagcagcatcttcggttggtgttcgatgagtatctgaagaccacagggaagccgatgaaggccagcatccgaggggagctgtctggggactttgagaagctaatgctggccgtagtgaagtgtatccggagcaccccggaatattttgctgaaaggctcttcaaggctatgaagggcctggggactcgggacaacaccctgatccgcatcatggtctcccgtagtgagttggacatgctcgacattcgggagatcttccggaccaagtatgagaagtccctctacagcatgatcaagaatgacacctctggcgagtacaagaagactctgctgaagctgtctgggggagatgatgatgctgctggccagttcttcccggaggcagcgcaggtggcctatcagatgtgggaacttagtgcagtggcccgagtagagctgaagggaactgtgcgcccagccaatgacttcaaccctgacgcagatgccaaagcgctgcggaaagccatgaagggactcgggactgacgaagacacaatcatcgatatcatcacgcaccgcagcaatgtccagcggcagcagatccggcagaccttcaagtctcactttggccgggacttaatgactgacctgaagtctgagatctctggagacctggcaaggctgattctggggctcatgatgccaccggcccattacgatgccaagcagttgaagaaggccatggagggagccggcacagatgaaaaggctcttattgaaatcctggccactcggaccaatgctgaaatccgggccatcaatgaggcctataaggaggactatcacaagtccctggaggatgctctgagctcagacacatctggccacttcaggaggatcctcatttctctggccacggggcatcgtgaggagggaggagaaaacctggaccaggcacgggaagatgcccaggtggctgctgagatcttggaaatagcagacacacctagtggagacaaaacttccttggagacacgtttcatgacgatcctgtgtacccggacgtatccgcacctccggagagtcttccaggagttcatcaagatgaccaactatgacgtggagcacaccatcaagaaggagatgtctggggatgtcagggatgcatttgtggccattgttcaaagtgtcaagaacaagcctctcttctttgccgacaaactttacaaatccatgaagggtgctggcacagatgagaagactctgaccaggatcatggtatcccgcagtgagattgacctgctcaacatccggagggaattcattgagaaatatgacaagtctctccaccaagccattgagggtgacacctccggagacttcctgaaggccttgctggctctctgtggtggtgaggactagggccacagctttggcgggcacttctgccaagaaatggttatcagcaccagccgccatggccaagcctgattgttccagctccagagactaaggaaggggcaggggtggggggaggggttgggttgggctcttatcttcatggagcttaggaaacgctcccactcccacgggccatcgagggccagcacggctgagcggtgaaaaaccgtagccatagatcctgtccacctccactcccctctgaccctcaggctttcccagcttcctccccttgctacagcctctgccctggtttggctatgtcagatccaataaacatcctgaacctctgtctgt

SEQ ID NO: 132 - DNA, 2945 bp, Homo sapiens
ccagccccccttcccttccctgaccccttcttgccatcgccccagacatggggaacgcggcgaccgccaagaaaggcagcgaggtggagagcgtgaaagagtttctagccaaagccaaagaagactttttgaaaaaatgggagaatccaactcagaataatgccggacttgaagattttgaaaggaaaaaaacccttggaacaggttcatttggaagagtcatgttggtaaaacacaaagccactgaacagtattatgccatgaagatcttagataagcagaaggttgttaaactgaagcaaatagagcatactttgaatgagaaaagaatattacaggcagtgaattttcctttccttgttcgactggagtatgcttttaaggataattctaatttatacatggttatggaatatgtccctgggggtgaaatgttttcacatctaagaagaattggaaggttcagtgagccccatgcacggttctatgcagctcagatagtgctaacattcgagtacctccattcactagacctcatctacagagatctaaaacctgaaaatctcttaattgaccatcaaggctatatccaggtcacagactttgggtttgccaaaagagttaaaggcagaacttggacattatgtggaactccagagtatttggctccagaaataattctcagcaagggctacaataaggcagtggattggtgggcattaggagtgctaatctatgaaatggcagctggctatcccccattctttgcagaccaaccaattcagatttatgaaaagattgtttctggaaaggtccgattcccatcccacttcagttcagatctcaaggaccttctacggaacctgctgcaggtggatttgaccaagagatttggaaatctaaagaatggtgtcagtgatataaaaactcacaagtggtttgccacgacagattggattgctatttaccagaggaaggttgaagctccattcataccaaagtttagaggctctggagataccagcaactttgatgactatgaagaagaagatatccgtgtctctataacagaaaaatgtgcaaaagaatttggtgaattttaaagaggaacaagatgacatctgagctcacactcagtgtttgcactctgttgagagataaggtagagctgagaccgtccttgttgaagcagttacctagttccttcattccaacgactgagtgaggtctttattgccatcatccgtgtgcgcactctgcatccacctatgtaacaaggcaccgctaagcaagcattgtctgtgccataacacagtactagaccactttcttacttctctttgggttgtctttctcctctcctacatccatttcttccttttcaatttcattggttttctctaaacagtgctccattttattttgttggtgtttcagatgggcagtgttatggctacgtgatatttgaagggaaggataagtgttgctttcagtagttattgccaatattgttgttggtcaatggcttgaagataaactttctaataattattatttctttgagtagctcagacttggttttgccaaaactcttggtaatttttgaagatagactgtcttatcaccaaggaaatttatacaaattaagactaactttcttggaattcactattctggcaataaattttggtagactaatacagtacagctagacccagaaatttggaaggctgtagatcagaggttctagttccctttccctccttttatatcctcctctccttgagtaatgaagtgaccagcctgtgtagtgtgacaaacgtgtctcattcagcaggaaaaactaatgatatggatcatcacccagattctctcacttggtaccagcatttctgtaggtattagagaagagttctaagttttctaaaccttaactgttccttaaggattttagccagtattttaatagaacatgattaatgaaagtgacaaattttaaattttctctaatagtcctcatcataaactttttaaaggaaaataagcaaactaaaaagaacattggtttagataaatacttatactttgcaaagtcaaaaatggcttgatttttggaaacaatatagaggtattcatatttaaatgagggtttacatttgttttgttttgtaaccgttaaaaagaagttgtttccagctaattattgtggtgtactatatttgtgagcctagggtaggggcactgctgcaacttctgctttcatcccatgcctcatcaatgaggaaagggaacaaagtgtataaaacctgccacaattgtattttaattttgaggtatgatattttcagatatttcataatttctaacctctgttctctcagtaaacagaatgtctgatcgatcatgcagatacaatgttggtatttgagaggttagtttttttcctacacttttttttgccaactgacttaacaacattgctgtcaggtggaaatttcaagcacttttgcacatttagttcagtgtttgttgagaatccatggcttaacccacttgttttgctatttttttctttgcttttaattttccccatctgattttatctctgcgtttcagtgacctaccttaaaacaacacacgagaagagttaaactgggttcattttaatgatcaatttacctgcatataaaatttatttttaatcaagctgatcttaatgtatataatcattctatttgctttattatcggtgcaggtaggtcattaacaccacttcttttcatctgtaccacaccctggtgaaacctttgaagacataaaaaaaacctgtctgagatgttctttctaccaatctatatgtctttcggttatcaagtgtttctgcatggtaatgtcatgtaaatgctgatattgatttcactggtccatctatatttaaaacgtgc

SEQ ID NO: 133 - DNA, 5047 bp, Homo sapiens
ccgttgctgtcgccgttgctgtcgggggcgctgtgcgctgaggaaggcgcgggcgagccggagcagaagaaggagggagggagccagccgctgcagccaccaccgccaccatgtcctaccaaggcaagaagaacatcccgcggatcacgagtgaccgtctccttatcaagggaggcagaatcgtcaatgatgatcagtccttttatgctgatatttacatggaagatggcttaataaaacaaattggagacaatctgattgttcctggaggagtgaagaccattgaagccaatgggaagatggtgatccctggaggcatcgatgtccatactcacttccagatgccatataagggaatgaccacagtagatgacttcttccaagggacaaaggcggccttagcaggtggcaccaccatgatcattgaccatgtggtgcctgagcctgagtccagcctgactgaggcctatgagaaatggagagagtgggctgatgggaagagttgctgtgactatgccctgcatgtggacatcacccactggaatgacagcgtcaagcaggaagtgcagaacctcatcaaggacaaaggggttaactccttcatggtttatatggcttataaggatttgtatcaagtatctaacacagagctctatgagatcttcacctgcctgggagagctgggggccattgctcaagttcatgctgagaatggggatatcattgcccaggagcaaacccgcatgttggaaatggggataactggcccagaaggccatgtactgagcaggccagaagagctggaagctgaggctgtgttccgtgccatcaccattgccagccaaaccaattgccctctctacgtcacaaaggtcatgagcaagagtgcagctgacctcatctcacaagccaggaaaaaaggaaatgtagtctttggtgagcccatcactgccagcctcggcatagatggaacccattattggagcaagaactgggccaaggcggctgcatttgtgacatccccacccctgagccctgacccaactactccggactacatcaactccttgctggccagcggggatctgcagctatctgggagtgcccactgcaccttcagcactgcccagaaagcaattgggaaggacaacttcacagccattcctgagggcaccaatggtgtggaggagcggatgtctgtcatctgggacaaggctgtggccacagggaaaatggacgaaaaccagttcgtggctgtgacaagcacaaacgctgccaagatcttcaacctgtatccccgcaagggaagaatatctgtgggttctgacagcgacctcgtcatctgggatccagatgctgtgaagatcgtctctgccaagaaccaccagtctgcggcagagtacaacatctttgaagggatggagctgcgcggggctcctctggttgtcatctgccagggcaagatcatgctggaagatggcaacctgcacgtgacccagggggctggccgcttcataccctgcagcccgttctccgactatgtctacaagcgcattaaagcacggaggaagatggcagacctgcatgccgtcccaaggggcatgtacgatgggcctgtgtttgacctgaccaccacccccaaaggtggcacccccgcaggctctgctcggggctctcctactcggccgaacccacctgtgaggaatcttcatcagtcgggatttagcctgtcaggcacccaagtggatgagggggttcgctcagccagcaagcgcatcgtggcccccccaggcggccgttctaatatcacatctctgagttaagcaagccttcctcaaagagaggggcagaagcaagaagagattgttttgaagccaaaatggtacaccgatatttaagaaggaaagcgaatccaaacggttgtgatctaaagaatcaataagcctcaagccttatgtttctccaatgttacgctcgcttgcctagctttacgaatattgctttgttttctgtttatgcatagccttgatttgtttgactcccctccccccatttacatgcatgcaatcagacaggccactaaggtaaaagagtctgctctatcatagtgttgagagcgtgtgtagtgctgcatcttatgacaaggggacagacaagctgggacgtcagggaaatgaacaaaagggacgcaggttatttggggtgagtgggtggtgggagcctggagcaaggtggagggtgcagaggggctggggtagggcatgtaggagggaggtgggtgggtcaggtgagtggaaggggtgttgtatattgtgttgatgacgtacgttatttccatggaagatagccgctgtggcagctgtcacatcaccacagctccctagggtctgccgagaaggcaggcagtctttgggttctgttctttgtcacgtcccctacaagtaaattttgtttctttgaacgtttattaaaatgccaagacccaaccatttcttccacctgcttgattgtgccagtgtttgctcaggcctctttcttagtgttgctttcaaatccttctctttcctgggttgggaaggccaggcagggacagagcaaatgacacttctcttcctcttgccctccctgcctctttggtgctcttaaaagccagcagctgagaacatagcacaggcccacgtggtgagggcacccacagcttaaagacgcttccttctaaacacggcgaggtcacctctcactcttctgtctttgcaaaccgagaagagtggcatgcttctggcatcccaagtcaggattttagctcagatgaggcagaatgaagggcctctcttacaggcagtttgtgtttgattctctcgatcctggcacatccatgataaataggagtttttgaaagttggttttattaggtgttccctaatttttaccgtaataggtcatctcagcttatatgaaagtcaagtggggaactgggaaagccaaagtcagtcttgagcagagggagcacattttgtggacctggttccacctttccattccaaaccacctgtttccccttccattagcagaaactctgggggaactttgtgtctcagtcctagaatctccccaagtgagtggaagtgacatgatgcagtcttcctcatggggcacctgaaagaaattagtgtgggtgcttcgatctaccttgtctgtcagagttgaatatctctttccctatcatgctgcttctgaaaattcagttttggagcaagtcctgtgagcaagataagaatctatagaaccaagatgctcattttcagaagaaatatgttcaacctgggatcagacttccatgctctggggaatccaagtggtagcacctgtaaccctgtgtactaagtgctttgaagagaagagcaggcctcagacaccttttaattgcttaggagaaaccattgtctctgactgcaggtttgaataagttgaagaccagagaaaagtacacactgggctacaaaggaatttggagatagccaaggaacaggatttcccctagcaagctaccttctgttcaaatcatgaaaaaagactatttccccttagaatagggaagcttgctattttaaagctcttgtagtgcttttcttttaagggagatgtagtaaaagggaaaatgtagctcttagtttacacttcaaagatgtgggggtctttcagagaactaagaataacagttttatgtgcagagagagtttgccagatctgaagcatatacctcattgactaggctgttactttgggataggttgcagtaccagccacagccagcagatagaggaaaagacacacataaactcgcttctgagcgtccacttctgcactctctgctctgctgttactcagcccctgagtctgactcatctctgcacaacctctctgtgccatgaagataagtcttccatggccaaatcggtcatccgcactgcccttgggacttccgaagtgaaccattccaccagaacctttgattctgcacaagatttccttgctctgggaacaacccccaaatgcccttgggaggaacaacatgagctcaggaagcctctctttcttcacttaccattactaactctccaagcatagaaatccctgggaattgcgagaataactcccactattttaaaatttatattcagatttgtttcgtttcataagacacatcaaacaggcctatacaaaaggtttaggaaaagaaaacaatggtgagtcccggccctcttcgaattcactggcacctcatgcaagtgtaggaaggcacgctggatcgtctatctgattccaaagctgtcctttgccatctcatcccttggcctgccccccaaccctgaggatgcccctgccatccccccaacctcctcatattgcctctgaacccagatggcaatccatcccggttctctctgagggccacgggcttgggtagtggaaagggtgtttgggaaattgttaaatcagttacccgtagtagagctatttcttgtacttctaagttttctagaagtggaaggattgtagtcatcctgaaaatgggtttacttcaaaatccctcagccttgttcttcacgactgtctatactgagagtgtcatgtttccacaaagggctgacacctgagcctggattttcactcatccctgagaagccctttccagtagggtgggcaattcccaacttccttgccacaagcttcccaggctttctcccctggaaaactccagcttgagtcccagatacactcatgggctgccctgggcagccagcattcattgtaagttccctctttgaaaactggtgtgtgggtgttcagttctgtgtctggtgggtatggacagacagtaatctcctgtgatctgtgctagctgtgaggcagctctggaacgtgaagagctgtttggtttgaaccgtgaacaaaactgtgttttgagtttagctgacattaaagaaaaaagttcatcacgtgactgttaatgtaaacctggttattaaaataactatgaaattac

SEQ ID NO: 134 - DNA, 15164 bp, Homo sapiens
gaattccgcctctgcggagccgggctcgggtcgccggagccgcgccccaccccgccagctccagagccacgactaatggctgaaggataaatcaacatggcaactatgattccaccagtgaagctgaaatggcttgaacacttgaacagctcctggattacagaggacagtgaatctattgctacaagagagggagttgctgttctgtattctaaactggttagcaataaggaagtagtacctttgccccaacaagttttatgcctcaaaggaccacagttgccagactttgaacgtgagtctctttcaagtgatgagcaggaccactatttggatgcccttcttagcagccagctagcattggcaaagatggtatgttcagattccccatttgccggggcacttagaaaacgactgcttgtactccagcgtgtcttttatgcactttctaataaataccatgacaaaggcaaggtgaagcagcagcagcattctccggagagcagttctggttcagcagatgtccattctgttagtgaacgcccccggtcaagcactgatgcacttatagaaatgggtgttcgaactggtctaagtttattatttgcgcttctaagacaaagttggatgatgcctgtgtcaggacctggtctcagtctttgcaacgatgtcattcatactgcaattgaagttgtgagctctttgccaccattatcattagcaaatgaaagcaagattcctcctatgggcttggactgcttatcgcaagtaacaacatttcttaaaggagtcactattcctaattctggggcagacactttaggtcgtagattagcttctgagttgctgcttggtttggcagctcaacgaggctcattgcgatatcttcttgaatggatagaaatggctttgggggcttcggcagttgtacacaccatggagaaaggcaaactactctcaagccaggaaggaatgatcagctttgactgctttatgaccatattaatgcagatgaggcgttctttgggttcatctgctgatcggagtcagtggagagaaccaaccagaacatcggatggcttgtgctccctttacgaggcagcattatgtctctttgaagaggtttgcagaatggcttctgattattcgagaacatgtgctagcccagatagcattcagactggtgatgctcccattgtctccgaaacctgtgaggtttatgtttgggggagcaatagcagccatcagttggtagaaggtacacaggagaaaatactgcaacccaaactggctcctagtttctctgatgcacagaccattgaagctggacagtactgcacttttgtcatttctacggatggctcagttagagcttgcgggaaaggcagctatgggagactgggccttggagactccaataatcagtcaactttaaaaaagttaacattcgagcctcacagatccattaaaaaggtttcatcttctaaaggatctgatggtcacactttagcctttacgacagaaggagaagtcttcagttggggagatggtgattatgggaaactggggcatggaaatagttcaacacagaaatatcccaagcttattcagggacctctacaaggaaaggtagttgtttgtgtgtcagctggatacagacatagtgctgctgtcacagaggatggggaattatacacatggggtgaaggagactttggaagattaggtcatggtgacagcaatagtcgtaacattccaacattagtaaaagacatcagcaatgtaggagaggtttcttgtggcagttcacatactattgctctgtctaaagatgggagaactgtatggtcttttggaggaggagacaatggtaaacttggtcatggtgataccaacagagtgtataaacctaaagttattgaagctttacaaggaatgttcattcgcaaagtttgtgctgggagccagtcttcacttgctttgacatcaacagggcaggtctatgcttggggctgtggagcttgtctaggttgtggttcttcagaagctactgctttgagacccaagcttattgaagaactggctgccacaagaatagttgatgtttctattggagacagtcattgtttggctctttctcatgataatgaagtttatgcctggggcaataactcaatggggcaatgtggtcagggaaattccacaggtcctattactaaaccaaagaaagtgagtggcttagatggcatagctattcagcagatttcggctggaacatcacatagtctggcatggactgctcttcctagggacagacaagttgttgcatggcaccgaccttattgtgtagatcttgaagagagtaccttctcacacctgcgttcttttcttgagagatactgtgataaaataaacagtgagattcccccactccctttcccttcatcaagagaacaccacagttttctcaagctgtgcctgaagctactttcaaatcaccttgctcttgcacttgcgggaggggtagctaccagcattctcgggaggcaggcaggtccacttcgaaatttgctcttcagactgatggactcaactgtcccagatgaaatccaagaggtggtaattgaaactttatcagtgggagcaaccatgctgttacctccattacgagaacggatggaattacttcattctcttttacctcaaggacctgatagatgggaaagcttatctaaaggacagagaatgcaactggatatcatcctgacaagtttgcaagatcatacccacgtagcctccctacttggctatagttcaccctctgatgctgctgacctatcttctgtgtgtactggctacggaaatctgtcagatcaaccttacggcactcagagctgccatccagatacccacctggctgaaattttgatgaagaccctcttaagaaatttaggattttatacagatcaagcatttggagagctagaaaagaatagtgataaatttctacttggaacatcatcatcagaaaacagtcagcctgctcatcttcatgaactgctatgttcactacagaaacagctgctggcattttgccatatcaataacattagtgagaactcaagcagtgtggcattgcttcataaacatcttcagcttttgttgcctcatgccacagatatttattcacgttctgcaaatttgctcaaagaaagtccttggaatggcagtgttggagaaaaattaagagatgtgatatacgtctcagctgctggcagtatgctctgccagattgttaactccctgctgttactccctgtgtcagtggctcggcctttattgagttacctcctcgacttgttgccacctcttgattgccttaatagactcctgccagctgctgatcttttagaagaccaggagttacagtggcctcttcatggagggccagaactaattgatcctgctggtctgccattacctcagccagctcagtcctgggtatggcttgtggatctagaaagaacaattgctctccttattgggcggtgtcttggtggcatgcttcagggctcccctgtgtctccagaggaacaggacactgcatattggatgaaaacgccactgttcagtgacggtgtagaaatggacactcctcaattggataaatgtatgagttgcctgttagaagtagcactttctggaaatgaagaacagaagccttttgattataaattgcggcctgaaattgctgtctatgtagacttggcattgggttgttctaaagagcctgcccgaagcctttggatcagcatgcaggactatgctgttagtaaagattgggacagtgcaactttaagtaatgagtcactcttggacactgtgtctagatttgttcttgcagctcttctgaaacacacaaatttacttagtcaagcatgtggagaaagccgatatcaacctggtaaacacttatcagaagtgtaccgttgtgtatacaaagttcgaagtcgtttacttgcttgcaagaaccttgaacttattcaaacaaggtcatcatcacgggacagatggatatcagaaaaccaggactctgcagatgttgatcctcaggagcattcatttactcgaactattgatgaagaagctgaaatggaagaacaggctgagagagaccgggaagaggggcatccggagccagaggatgaagaggaggaacgggaacatgaagtgatgacagctggcaaaatctttcagtgtttcctctcagcccgtgaagtagctcgtagccgagaccgagatagaatgaacagtggggcagggtctggggctcgagctgatgatccacctcctcagtctcagcaagagcgaagggtcagcacagaccttcctgagggtcaggatgtgtacactgctgcatgcaactccgtgatccatcggtgtgccctgttaatattaggagtaagtcctgtgatagatgagcttcagaagcgaagagaagaaggacagttgcagcaaccttcaacaagtgcctctgaagggggtggacttatgaccaggagtgaaagtcttactgcagagagccggctagtccacacaagcccaaattatagactgatcaaatcgaggagtgaatctgatttgtctcagcctgaatcagatgaagagggttacgcactgagtggcagacaaaatgttgatttggatttggcagcatctcacagaaagagaggtcctatgcacagtcaattggaatccctgagtgactcttgggctcgcctgaaacatagcagagactggttatgcaactcctcctattcctttgagtcagattttgatcttaccaagtctttgggagttcacactttgattgaaaatgttgtaagctttgtgagtggagatgtggggaatgccccaggttttaaagagccagaggaaagtatgtctacaagtccccaggcctccatcattgcaatggaacagcagcagttaagggcagaacttcgtttagaggcacttcatcagatcctcgttctattgtctgggatggaagaaaaaggtagcatctcactggcaggaagcagattgagttcaggcttccagtcctccacactactcacgtctgtgaggctgcagttcctagcagggtgttttggtttaggcactgttggacacacaggagccaagggagagagtggccgattgcatcactatcaggatgggatcagagcagctaagagaaatattcagattgaaatccaggtagctgtgcataaaatttatcaacagttgtctgctaccctggaaagagccctgcaagcaaacaagcatcacattgaagcccagcaacgtctgcttctggttacagtttttgccctaagtgttcattatcaaccagtagatgtttctttggcaatttccactggtctgctaaacgtattgtcacagttgtgtggtacagacaccatgctaggacagcccctgcagttgttgccaaagacgggtgtttcccagcttagcacagctttgaaagtggccagtacaaggttgctccagattctagccatcactactgggacctatgctgataaactgagtcccaaagtagttcaatccttgttggatctactctgtagtcagttgaagaatttattgtcccaaactggtgtactacatatggcctctttcggagaaggggagcaagaagacggtgaagaagaagaaaaaaaagttgactccagtggagaaactgagaagaaagatttcagagctgctcttaggaaacaacatgcagccgaactccatctaggggattttttagtttttcttcgcagagttgtatcttcaaaagcaattcaatcaaaaatggcttccccaaagtggaccgaagtgcttctaaatatagcatctcagaaatgttcttcaggtatccctctggttggtaacttaagaacaaggctccttgcacttcatgtccttgaagctgtgctgccagcttgtgaatctggtgtagaagatgatcaaatggcccagattgttgagcgcttattttcccttctctctgattgtatgtgggagacacccattgctcaggccaaacatgctattcagataaaggaaaaagaacaagaaataaaactacagaagcagggcgagttggaagaagaagatgagaatcttcctatccaagaagtatcctttgacccggagaaagctcagtgttgcctagtggagaatggacagattttaactcacggcagtggagggaaaggatatggattggcatctacaggagtaacttctgggtgctatcagtggaagttttatattgtgaaggaaaacagaggtaatgaaggcacgtgtgttggagtttctcgctggccagtacatgactttaatcaccgcactacctcggatatgtggctctatagggcctacagtggtaacctctatcacaatggagaacagactctcacattgtccagctttactcaaggagatttcattacctgtgtgttagacatggaagccaggaccatttcttttgggaaaaatggagaggaacccaaattagcttttgaagatgtggatgcagcagagttgtacccatgtgtgatgttctatagtagcaatccaggggaaaaggtgaaaatttgtgatatgcagatgcgtggcacaccccgagacttacttccaggagaccctatttgtagtccagtagcagcagtgctggctgaggccactattcagctcgtccgtatccttcaccgaacagaccgttggacttactgcattaacaaaaaaatgatggaaaggcttcacaaaattaagatatgtattaaagagtcaggtcagaagctaaagaaaagccgctcggttcagagccgagaggaaaatgaaatgagagaggagaaggagagcaaagaggaagagaaaggtaaacatactaggcatggcctcgctgacctctcagagctgcagctgaggactctttgcatagaggtgtggcccgtgctggctgtgataggaggagttgatgctggtcttagagttggaggtcggtgtgttcacaagcaaactgggcgccatgccacgctgctgggagtggtcaaagagggcagcacgtctgccaaggtccaatgggatgaagcagaaattactatcagcttcccaactttttggtcgcctagtgatactccattgtataatctggaaccctgtgaaccattgccgtttgatgtggcgcgattccgaggcctgacggcttctgtgctgctggacctaacatatctcactggcgttcatgaagacatgggcaaacagagcaccaaacgacatgaaaagaaacaccgacatgaatccgaggagaaaggggatgttgagcagaaacctgagagtgaatccgctttagatatgcgaacaggcctaacatctgatgacgtcaaaagtcagagtaccacaagctccaaatcagaaaatgaaatcgcttcattttctttagatccaacactgccaagtgtggaatcccaacatcaaataacagaagggaaaagaaaaaatcatgaacacatgtccaaaaaccatgatgtagcccagtcagaaatcagagcagtccagctgtcctatctttacctcggtgctatgaagtcacttagtgcccttcttggctgtagtaaatatgctgagctgttgctgataccaaaagttctggctgaaaatggccacaactcagactgtgcaagttctccagttgttcatgaagacgtggagatgcgagcagccctgcagttcttgatgcgacacatggtgaagcgagcagtcatgcggtcacccataaagagagcattgggattagctgatctggaacgagcgcaagccatgatctataaattagtggttcatgggcttttggaagaccagtttgggggcaaaattaagcaagagattgatcaacaagctgaagaaagtgaccctgcccagcaggcacagacaccagttactactagcccatcagcctcaagcacgacctcctttatgagcagctctctggaggacaccacaactgccaccactccagtcactgacacagaaacagtgcctgcatccgagtccccgggagtgatgcctcttagtcttctcaggcaaatgttctctagttacccaactaccactgtacttcccacacgtcgggcacagactcctccaatatcttcgttaccaacctctccttctgatgaagtaggaaggaggcaaagtttaacttctcctgattcccagtcagcaaggccagctaaccgcacagccttgtcagacccaagcagtagactttcaacttctcctcctcctccagcaattgcagttcccttgctggaaatggggttctctcttcggcagattgccaaagccatggaagctacaggtgctaggggagaggctgatgcccagaatatcactgtccttgccatgtggatgatagagcaccctgggcatgaggatgaagaggagccccagtcgggcagcacagcagactctaggcctggagcagccgttctaggcagtggcgggaagtcaaatgatccctgttatttgcagtcacctggagacataccatcagctgatgctgctgaaatggaggaaggttttagtgaaagccctgataatttggatcatacagagaatgcagcttctggaagtggaccatcagctagaggtcgctcagcggtaacaagaagacacaagtttgacttagctgctcgcacactgctagcaagagcagcgggattataccgctctgtgcaggcccacaggaatcaaagtcggagagaaggaatatctttgcagcaagacccaggggcgttgtatgactttaatttagatgaggaattggaaattgatcttgatgatgaggcgatggaagctatgtttggacaagacctgaccagtgacaatgatattctgggaatgtggatcccagaggtactggattggcctacctggcatgtttgtgagtctgaagacagggaagaagtggtggtgtgtgaactgtgtgaatgcagcgtcgtcagcttcaatcagcacatgaagagaaaccatccaggctgtgggcgcagtgcaaaccgccagggctatcgcagcaatggttcctatgtggatggctggtttggcggtgaatgtgggagtggaaatccatactacctgttatgtggcacctgcagggagaagtacttagccatgaagaccaaatctaagtcaacaagttctgaaaggtacaagggacaagctccagatctaattggcaagcaagacagtgtgtatgaagaagactgggacatgttggatgttgatgaagatgaaaagctaactggtgaagaagaatttgaattacttgctggaccgcttggtttaaatgaccggcgcattgtaccagaaccagttcagttccctgacagcgatccactgggagcatcagtagcaatggtcacagccaccaacagtatggaagagactctgatgcaaataggttgccatggctccgtagaaaagagctcctctgggagaataacgttaggagagcaggcagctgccctagcaaaccctcatgaccgtgtggtggctttaaggagagtgactgctgctgctcaggttcttctggccagaaccatggtcatgagagcgctgtctcttctctcagtcagtggttccagttgtagcctggctgctggtcttgagtctctggggctaacagatatccgaacgctagttcgattaatgtgcttggcagcagcagggagagctggcctctccaccagcccttctgccatggctagcacctcagaacgatcacgaggtgggcatagcaaggctaacaagcctatctcttgcctggcctatttgagcacagcagtgggatgtctggcatcaaatgctcctagtgctgccaaactgcttgtacagttgtgtacacagaacttgatttctgctgcaacaggtgtaaatctaaccacagttgatgactcaattcagcgaaagtttctacccagctttctccgaggaattgctgaagagaacaagcttgtgacctccccaaactttgttgtaacacaggcccttgtggcattgctagcagacaaaggggccaaactaagacctaactatgataagtcagaagttgaaaagaaaggccctctggagttggctaatgccctggcagcctgctgcctctcctccaggctgtcctcacagcatcggcaatgggcagctcagcaactcgtgcgcactcttgctgcacacgaccgtgacaaccaaactactctgcagacacttgctgatatgggaggagatcttagaaaatgctcctttatcaaattggaggctcatcagaacagagtaatgacatgtgtttggtgtaataaaaaaggtcttttggctacaagtggcaatgatggcaccatccgcgtatggaatgttaccaagaagcaatattcactgcaacagacctgtgtgttcaacagattggaaggggatgctgaggaaagcctgggatcacccagtgatccaagtttctcaccagtttcctggagtatcagtggcaaatatctagcaggcgctttggaaaagatggtgaatatctggcaagttaatggaggaaaaggattagtagatattcagcctcattgggtatctgccctggcttggccagaagagggtccggctacagcctggtcaggagagtctccagaattgttgttggtgggacggatggatggatctctgggactgattgaagttgttgatgtgtccaccatgcaccgtcgagaattggagcattgctatcgaaaggatgtgtctgttacttgcattgcatggttcagtgaagacagaccatttgcagtgggatattttgatggaaaactgttactgggaacaaaggaaccacttgagaaaggaggcattgttctaattgatgcacataaggatactcttattagcatgaagtgggaccctacaggtcatattcttatgacatgtgccaaagaagacagtgtgaaactctggggctctatttcgggatgctggtgctgtctacattcactctgccatccatctattgtaaatggcattgcttggtgccgccttccagggaaaggatccaagttgcagttactgatggctactggctgtcagagtggcttagtatgtgtttggcgcattcctcaagatactacacagaccaatgtgactagtgcagaaggatggtgggaccaggaatcaaattgccaggatggatataggaaatcatcaggagccaagtgtgtttatcagctgcggggacacatcactcctgttcggactgttgcctttagttctgatgggttggccctggtgtctggtggactaggtgggctcatgaacatttggtctttaagggatggctctgtcttgcaaactgttgtgataggctctggagctattcagaccacagtatggattccagaagttggagtagctgcttgctcaaatagatcaaaggatgttttggtcgtgaattgtacagcagaatgggcagctgccaatcatgttttggcaacctgtaggacagcattgaaacagcagggtgttctgggattgaacatggctccctgcatgagagcatttttggagcggctccccatgatgcttcaggagcagtatgcctatgaaaagcctcatgtggtttgtggtgaccaacttgttcatagcccctatatgcaatgcttggcttcccttgctgtgggacttcatctggatcagctgttgtgtaaccctccagtgccaccacaccaccagaactgtctgcctgaccctgcatcctggaatccaaatgaatgggcctggttagaatgtttctcaaccactataaaagctgccgaagccctgaccaatggagcccagtttccagaatcttttaccgttccagatctagaacctgttccagaggatgaacttgtatttctaatggataacagtaaatggattaacggcatggatgaacaaattatgtcttgggcaacttccagacctgaggactggcacctgggaggtaaatgtgatgtctacttatggggtgctggtaggcatggacagctggcagaagctggaagaaatgtaatggtacctgcagcagctccctcattctcacaggcccaacaggtcatttgtggtcagaattgtacctttgtcatccaggccaatggcacagtgttggcttgtggggaaggaagttatggcagattaggacaaggaaattcagatgaccttcatgtgctgacagttatttcagccttacaaggctttgtggtgacccagctggtgacttcctgtggttctgatgggcactctatggccctaactgaaagtggtgaggtctttagctggggagatggtgactatggtaaacttggccatgggaacagcgacaggcagcggcggcccaggcagatcgaggccttacaaggagaagaagtggtgcagatgtcttgtggcttcaagcactcagcagtggtcacttcagatggcaaactgttcacctttgggaatggtgactatggtcgtctgggtcttggaaatacctctaacaaaaaacttccagagagagtgactgcactggagggatatcagattggacaggtggcctgtggattaaaccacactttggcagtgtcagcagatggttccatggtgtgggcttttggagatggagactatggaaaactaggcttaggaaattccactgcaaaatcttcacctcagaaaattgacgtcctttgtggaattggaataaaaaaggttgcttgtggaactcagttttctgttgctttgaccaaagatggtcatgtgtatacctttggtcaagatcgcctgataggcttgccagaggggcgtgctcgcaatcacaatcgaccgcaacaaatccctgtcctggctggagtaatcattgaagatgtggcagttggagctgaacacacacttgctttggcatcaaatggagatgtgtatgcctgggggagcaattcagaagggcagctcggcttaggccataccaaccatgttcgagaaccaaccctggtaacaggtctgcaagggaaaaatgttcggcagatctcggctggccgctgccacagtgctgcatggacagcaccacctgtcccaccaagagcaccaggtgtgtcagtacctctgcagctgggcctgcctgacacagtgcccccccagtatggggcgctgagagaagtcagcattcacacggtgcgggccaggctccggctgctctaccacttctctgacctcatgtactcatcctggagactgctgaaccttagccccaacaaccagaacagcacatcccattataatgctggaacttggggcattgtacagggacaacttcggcctttgttagccccaagagtctacactctgccaatggtgcgctccataggaaaaaccatggttcaaggcaaaaactatggacctcagataactgtaaagaggatatcaaccagaggacggaagtgtaagcctatttttgtccaaatagcgagacaagtagttaagctgaatgcttcagacctccgcctgccttcccgagcgtggaaggttaagctggttggagaaggggctgatgatgctggaggagtgtttgatgacaccatcacagagatgtgccaggaacttgaaactggtattgttgaccttcttataccctctcccaatgccaccgcagaagtgggttacaatagggacaggttcctttttaacccttctgcctgcctcgatgaacacttaatgcagtttaagtttttaggaattttaatgggggttgccattcgcacaaagaagcctctggacctccacttggcccctctggtgtggaagcagctgtgctgtgtcccactcaccctagaggacctggaggaggtggatctgctctacgtgcagactctcaacagcattcttcacattgaagacagtgggattaccgaggagagtttccatgagatgattcctcttgattcttttgttggccagagtgctgatggcaaaatggttcctataatccctggtggaaatagtatcccactcacattttccaacaggaaggaatatgtggagagggccattgaatatcgacttcatgagatggacagacaggtggctgcagtccgagaagggatgtcctggattgttcctgtgccgctgctgtccctcctcacagcaaaacaactggagcagatggtgtgtgggatgcccgagatctctgtggaagtcttgaagaaagtggtgcggtaccgtgaggtggatgagcagcatcagctggtgcagtggttctggcacacgctggaagagttctccaatgaggagcgggtgcttttcatgaggtttgtgtcaggaagatctcgactaccagccaacactgctgacatttctcagagatttcaaatcatgaaggttgataggccttacgacagtctgcctacctcacagacctgcttcttccagctgaggctgcccccgtactccagccagctggtcatggccgagcgcctgcgctatgccatcaacaactgccgctcaatcgacatggacaactacatgctctcgagaaacgtggacaacgccgagggctccgacactgactactgaccgtgcgggtgctctcaccctcccttctctccctcaataatgctcacttctgatttgatgttgatatacttttatggtaactacatagatgttataagaacataaaccaacattataaacaatggccacatttagttactctaaatgtaacaaagaaattagatgtttttatttttctgtgattgtacaaaaacaacaaaaacgaagtgctctcagtcaggtttttccctccatatttttggtcacttttgataagtttgcatgaaaccattttggtgcatttttagttgggaatggtacatttttgtaaatccacccagtgaacatgaaattgtacattgtgtataattgttcattagaaaggacagttttacatgaatattcatatatttattttgttttaatttgaattgcctgttcagggttccttatgcagagaaataaagcagattcaggaattggaaaaaaaaaaaaaaaaaaaa

SEQ ID NO: 135 - DNA, 1981 bp, Homo sapiens
ggcacgagggaggctgcgagccgccgcgagttctcacggtcccgccggcgccaccaccgcggtcactcaccgccgccgccgccaccactgccaccacggtcgcctgccacaggtgtctgcaattgaactccaaggtgcagaatggtttggaaagtagctgtattcctcagtgtggccctgggcattggtgccattcctatagatgatcctgaagatggaggcaagcactgggtggtgatcgtggcaggttcaaatggctggtataattataggcaccaggcagacgcgtgccatgcctaccagatcattcaccgcaatgggattcctgacgaacagatcgttgtgatgatgtacgatgacattgcttactctgaagacaatcccactccaggaattgtgatcaacaggcccaatggcacagatgtctatcagggagtcccgaaggactacactggagaggatgttaccccacaaaatttccttgctgtgttgagaggcgatgcagaagcagtgaagggcataggatccggcaaagtcctgaagagtggcccccaggatcacgtgttcatttacttcactgaccatggatctactggaatactggtttttcccaatgaagatcttcatgtaaaggacctgaatgagaccatccattacatgtacaaacacaaaatgtaccgaaagatggtgttctacattgaagcctgtgagtctgggtccatgatgaaccacctgccggataacatcaatgtttatgcaactactgctgccaaccccagagagtcgtcctacgcctgttactatgatgagaagaggtccacgtacctgggggactggtacagcgtcaactggatggaagactcggacgtggaagatctgactaaagagaccctgcacaagcagtaccacctggtaaaatcgcacaccaacaccagccacgtcatgcagtatggaaacaaaacaatctccaccatgaaagtgatgcagtttcagggtatgaaacgcaaagccagttctcccgtccccctacctccagtcacacaccttgacctcacccccagccctgatgtgcctctcaccatcatgaaaaggaaactgatgaacaccaatgatctggaggagtccaggcagctcacggaggagatccagcggcatctggatgccaggcacctcattgagaagtcagtgcgtaagatcgtctccttgctggcagcgtccgaggctgaggtggagcagctcctgtccgagagagccccgctcacggggcacagctgctacccagaggccctgctgcacttccggacccactgcttcaactggcactcccccacgtacgagtatgcgttgagacatttgtacgtgctggtcaacctttgtgagaagccgtatccacttcacaggataaaattgtccatggaccacgtgtgccttggtcactactgaagagctgcctcctggaagcttttccaagtgtgagcgccccaccgactgtgtgctgatcagagactggagaggtggagtgagaagtctccgctgctcgggccctcctggggagcccccgctccagggctcgctccaggaccttcttcacaagatgacttgctcgctgttacctgcttccccagtcttttctgaaaaactacaaattagggtgggaaaagctctgtattgagaagggtcatatttgctttctaggaggtttgttgttttgcctgttagttttgaggagcaggaagctcatgggggcttctgtagcccctctcaaaaggagtctttattctgagaatttgaagctgaaacctctttaaatcttcagaatgattttattgaagagggccgcaagccccaaatggaaaactgtttttagaaaatatgatgatttttgattgcttttgtatttaattctgcaggtgttcaagtcttaaaaaataaagatttataacagaacccaaaaaaaaaaaaaaaaaaaaaaaaaaaaaaa

SEQ ID NO: 136 - DNA, 606 bp, Homo sapiens
ggggaagaagttggtgtttcgctgggccctggtactgaagacgcggtccgggtcgcccctagctgtttcctactcacccaaagccccgcacccgccttttctctctctcctctggcaggatgaggcgtgcaggcctgggtgaaggagtacctcctggcaactatgggaactatggctatgctaatagtgggtatagtgcctgtgaagaagaaaatgagaggctcactgaaagtctgagaagcaaagtaactgctataaaatctctttccattgaaataggccatgaagttaaaacccagaataaattattagctgaaatggattcacaatttgattccacaactggatttctaggtaaaactatgggcaaactgaagattttatccagagggagccaaacaaagctgctgtgctatatgatgctgttttctttatttgtcttttttatcatttattggattattaaactgaggtgatgcatgtaattgtgaatttggaatttgttccaacttaatggcttgcagtaccactttgataaaaatcagcatcaaaacattcctagtgttcaaatactgtggcattttccattgaaaattgctgaatttt

SEQ ID NO: 137 - DNA, 3069 bp, Homo sapiens
tgtttccgctgcatccagacttcctcaggcggtggctggaggctgcgcatctggggctttaaacatacaaagggattgccaggacctgcggcggcggcggcggcggcgggggctggggcgcgggggccggaccatgagccgctgagccgggcaaaccccaggccaccgagccagcggaccctcggagcgcagccctgcgccgcggaccaggctccaaccaggcggcgaggcggccacacgcaccgagccagcgacccccgggcgacgcgcggggccagggagcgctacgatggaggcgctaatggcccggggcgcgctcacgggtcccctgagggcgctctgtctcctgggctgcctgctgagccacgccgccgccgcgccgtcgcccatcatcaagttccccggcgatgtcgcccccaaaacggacaaagagttggcagtgcaatacctgaacaccttctatggctgccccaaggagagctgcaacctgtttgtgctgaaggacacactaaagaagatgcagaagttctttggactgccccagacaggtgatcttgaccagaataccatcgagaccatgcggaagccacgctgcggcaacccagatgtggccaactacaacttcttccctcgcaagcccaagtgggacaagaaccagatcacatacaggatcattggctacacacctgatctggacccagagacagtggatgatgcctttgctcgtgccttccaagtctggagcgatgtgaccccactgcggttttctcgaatccatgatggagaggcagacatcatgatcaactttggccgctgggagcatggcgatggatacccctttgacggtaaggacggactcctggctcatgccttcgccccaggcactggtgttgggggagactcccattttgatgacgatgagctatggaccttgggagaaggccaagtggtccgtgtgaagtatggcaacgccgatggggagtactgcaagttccccttcttgttcaatggcaaggagtacaacagctgcactgatactggccgcagcgatggcttcctctggtgctccaccacctacaactttgagaaggatggcaagtacggcttctgtccccatgaagccctgttcaccatgggcggcaacgctgaaggacagccctgcaagtttccattccgcttccagggcacatcctatgacagctgcaccactgagggccgcacggatggctaccgctggtgcggcaccactgaggactacgaccgcgacaagaagtatggcttctgccctgagaccgccatgtccactgttggtgggaactcagaaggtgccccctgtgtcttccccttcactttcctgggcaacaaatatgagagctgcaccagcgccggccgcagtgacggaaagatgtggtgtgcgaccacagccaactacgatgacgaccgcaagtggggcttctgccctgaccaagggtacagcctgttcctcgtggcagcccacgagtttggccacgccatggggctggagcactcccaagaccctggggccctgatggcacccatttacacctacaccaagaacttccgtctgtcccaggatgacatcaagggcattcaggagctctatggggcctctcctgacattgaccttggcaccggccccacccccacactgggccctgtcactcctgagatctgcaaacaggacattgtatttgatggcatcgctcagatccgtggtgagatcttcttcttcaaggaccggttcatttggcggactgtgacgccacgtgacaagcccatggggcccctgctggtggccacattctggcctgagctcccggaaaagattgatgcggtatacgaggccccacaggaggagaaggctgtgttctttgcagggaatgaatactggatctactcagccagcaccctggagcgagggtaccccaagccactgaccagcctgggactgccccctgatgtccagcgagtggatgccgcctttaactggagcaaaaacaagaagacatacatctttgctggagacaaattctggagatacaatgaggtgaagaagaaaatggatcctggctttcccaagctcatcgcagatgcctggaatgccatccccgataacctggatgccgtcgtggacctgcagggcggcggtcacagctacttcttcaagggtgcctattacctgaagctggagaaccaaagtctgaagagcgtgaagtttggaagcatcaaatccgactggctaggctgctgagctggccctggctcccacaggcccttcctctccactgccttcgatacaccgggcctggagaactagagaaggacccggaggggcctggcagccgtgccttcagctctacagctaatcagcattctcactcctacctggtaatttaagattccagagagtggctcctcccggtgcccaagaatagatgctgactgtactcctcccaggcgccccttccccctccaatcccaccaaccctcagagccacccctaaagagatcctttgatattttcaacgcagccctgctttgggctgccctggtgctgccacacttcaggctcttctcctttcacaaccttctgtggctcacagaacccttggagccaatggagactgtctcaagagggcactggtggcccgacagcctggcacagggcagtgggacagggcatggccaggtggccactccagacccctggcttttcactgctggctgccttagaacctttcttacattagcagtttgctttgtatgcactttgtttttttctttgggtcttgttttttttttccacttagaaattgcatttcctgacagaaggactcaggttgtctgaagtcactgcacagtgcatctcagcccacatagtgatggttcccctgttcactctacttagcatgtccctaccgagtctcttctccactggatggaggaaaaccaagccgtggcttcccgctcagccctccctgcccctcccttcaaccattccccatgggaaatgtcaacaagtatgaataaagacacctactgagtggc

SEQ ID NO: 138 - DNA, 3074 bp, Homo sapiens
gaattccggggagcaggaagagccaacatgctggccccgcgcggagccgccgtcctcctgctgcacctggtcctgcagcggtggctagcggcaggcgcccaggccaccccccaggtctttgaccttctcccatcttccagtcagaggctaaacccaggcgctctgctgccagtcctgacagaccccgccctgaatgatctctatgtgatttccaccttcaagctgcagactaaaagttcagccaccatcttcggtctttactcttcaactgacaacagtaaatattttgaatttactgtgatgggacgcttaagcaaagccatcctccgttacctgaagaacgatgggaaggtgcatttggtggttttcaacaacctgcagctggcagacggaaggcggcacaggatcctcctgaggctgagcaatttgcagcgaggggccggctccctagagctctacctggactgcatccaggtggattccgttcacaatctccccagggcctttgctggcccctcccagaaacctgagaccattgaattgaggactttccagaggaagccacaggacttcttggaagagctgaagctggtggtgagaggctcactgttccaggtggccagcctgcaagactgcttcctgcagcagagtgagccactggctgccacaggcacaggggactttaaccggcagttcttgggtcaaatgacacaattaaaccaactcctgggagaggtgaaggaccttctgagacagcaggttaaggaaacatcatttttgcgaaacaccatagctgaatgccaggcttgcggtcctctcaagtttcagtctccgaccccaagcacggtggtcgccccggctccccctgcaccgccaacacgcccacctcgtcggtgtgactccaacccatgtttccgaggtgtccaatgtaccgacagtagagatggcttccagtgtgggccctgccccgagggctacacaggaaacgggatcacctgtattgatgttgatgagtgcaaataccatccctgctacccgggcgtgcactgcataaatttgtctcctggcttcagatgtgacgcctgcccagtgggcttcacagggcccatggtgcagggtgttgggatcagttttgccaagtcaaacaagcaggtctgcactgacattgatgagtgtcgaaatggagcgtgcgttcccaactcgatctgcgttaatactttgggatcttaccgctgtgggccttgtaagccggggtatactggtgatcagataaggggatgcaaagtggaaagaaactgcagaaacccagagctgaacccttgcagtgtgaatgcccagtgcattgaagagaggcagggggatgtgacatgtgtgtgtggagtcggttgggctggagatggctatatctgtggaaaggatgtggacatcgacagttaccccgacgaagaactgccatgctctgccaggaactgtaaaaaggacaactgcaaatatgtgccaaattctggccaagaagatgcagacagagatggcattggcgacgcttgtgacgaggatgctgacggagatgggatcctgaatgagcaggataactgtgtcctgattcataatgtggaccaaaggaacagcgataaagatatctttggggatgcctgtgataactgcctgagtgtcttaaataacgaccagaaagacaccgatggggatggaagaggagatgcctgtgatgatgacatggatggagatggaataaaaaacattctggacaactgcccaaaatttcccaatcgtgaccaacgggacaaggatggtgatggtgtgggggatgcctgtgacagttgtcctgatgtcagcaaccctaaccagtctgatgtggataatgatctggttggggactcctgtgacaccaatcaggacagtgatggagatgggcaccaggacagcacagacaactgccccaccgtcattaacagtgcccagctggacaccgataaggatggaattggtgacgagtgtgatgatgatgatgacaatgatggtatcccagacctggtgccccctggaccagacaactgccggctggtccccaacccagcccaggaggatagcaacagcgacggagtgggagacatctgtgagtctgactttgaccaggaccaggtcatcgatcggatcgacgtctgcccagagaacgcagaggtcaccctgaccgacttcagggcttaccagaccgtgggcctggatcctgaaggggatgcccagatcgatcccaactgggtggtcctgaaccagggcatggagattgtacagaccatgaacagtgatcctggcctggcagtggggtacacagcttttaatggagttgacttcgaagggaccttccatgtgaatacccagacagatgatgactatgcaggctttatctttggctaccaagatagctccagcttctacgtggtcatgtggaagcagacggagcagacatattggcaagccaccccattccgagcagttgcagaacctggcattcagctcaaggctgtgaagtctaagacaggtccaggggagcatctccggaactccctgtggcacacgggggacaccagtgaccaggtcaggctgctgtggaaggactccaggaatgtgggctggaaggacaaggtgtcctaccgctggttcctacagcacaggccccaggtgggctacatcagggtacgattttatgaaggctctgagttggtggctgactctggcgtcaccatagacaccacaatgcgtggaggccgacttggcgttttctgcttctctcaagaaaacatcatctggtccaacctcaagtatcgctgcaatgacaccatccctgaggacttccaagagtttcaaacccagaatttcgaccgcttcgataattaaaccaaggaagcaatctgtaactgcttttcggaacactaaaaccatatatattttaacttcaattttctttagcttttaccaacccaaatatatcaaaacgttttatgtgaatgtggcaataaaggagaagagatcatttttaaaaaaaaaaaaaaaaaaaa

SEQ ID NO: 139 - DNA, 5921 bp, Homo sapiens
agcagacgggagtttctcctcggggtcggagcaggaggcacgcggagtgtgaggccacgcatgagcggacgctaaccccctccccagccacaaagagtctacatgtctagggtctagacatgttcagctttgtggacctccggctcctgctcctcttagcggccaccgccctcctgacgcacggccaagaggaaggccaagtcgagggccaagacgaagacatcccaccaatcacctgcgtacagaacggcctcaggtaccatgaccgagacgtgtggaaacccgagccctgccggatctgcgtctgcgacaacggcaaggtgttgtgcgatgacgtgatctgtgacgagaccaagaactgccccggcgccgaagtccccgagggcgagtgctgtcccgtctgccccgacggctcagagtcacccaccgaccaagaaaccaccggcgtcgagggacccaagggagacactggcccccgaggcccaaggggacccgcaggcccccctggccgagatggcatccctggacagcctggacttcccggaccccccggaccccccggacctcccggaccccctggcctcggaggaaactttgctccccagctgtcttatggctatgatgagaaatcaaccggaggaatttccgtgcctggccccatgggtccctctggtcctcgtggtctccctggcccccctggtgcacctggtccccaaggcttccaaggtccccctggtgagcctggcgagcctggagcttcaggtcccatgggtccccgaggtcccccaggtccccctggaaagaatggagatgatggggaagctggaaaacctggtcgtcctggtgagcgtgggcctcctgggcctcagggtgctcgaggattgcccggaacagctggcctccctggaatgaagggacacagaggtttcagtggtttggatggtgccaagggagatgctggtcctgctggtcctaagggtgagcctggcagccctggtgaaaatggagctcctggtcagatgggcccccgtggcctgcctggtgagagaggtcgccctggagcccctggccctgctggtgctcgtggaaatgatggtgctactggtgctgccgggccccctggtcccaccggccccgctggtcctcctggcttccctggtgctgttggtgctaagggtgaagctggtccccaagggccccgaggctctgaaggtccccagggtgtgcgtggtgagcctggcccccctggccctgctggtgctgctggccctgctggaaaccctggtgctgatggacagcctggtgctaaaggtgccaatggtgctcctggtattgctggtgctcctggcttccctggtgcccgaggcccctctggaccccagggccccggcggccctcctggtcccaagggtaacagcggtgaacctggtgctcctggcagcaaaggagacactggtgctaagggagagcctggccctgttggtgttcaaggaccccctggccctgctggagaggaaggaaagcgaggagctcgaggtgaacccggacccactggcctgcccggaccccctggcgagcgtggtggacctggtagccgtggtttccctggcgcagatggtgttgctggtcccaagggtcccgctggtgaacgtggttctcctggccccgctggccccaaaggatctcctggtgaagctggtcgtcccggtgaagctggtctgcctggtgccaagggtctgactggaagccctggcagccctggtcctgatggcaaaactggcccccctggtcccgccggtcaagatggtcgccccggacccccaggcccacctggtgcccgtggtcaggctggtgtgatgggattccctggacctaaaggtgctgctggagagcccggcaaggctggagagcgaggtgttcccggaccccctggcgctgtcggtcctgctggcaaagatggagaggctggagctcagggaccccctggccctgctggtcccgctggcgagagaggtgaacaaggccctgctggctcccccggattccagggtctccctggtcctgctggtcctccaggtgaagcaggcaaacctggtgaacagggtgttcctggagaccttggcgcccctggcccctctggagcaagaggcgagagaggtttccctggcgagcgtggtgtgcaaggtccccctggtcctgctggaccccgaggggccaacggtgctcccggcaacgatggtgctaagggtgatgctggtgcccctggagctcccggtagccagggcgcccctggccttcagggaatgcctggtgaacgtggtgcagctggtcttccagggcctaagggtgacagaggtgatgctggtcccaaaggtgctgatggctctcctggcaaagatggcgtccgtggtctgaccggccccattggtcctcctggccctgctggtgcccctggtgacaagggtgaaagtggtcccagcggccctgctggtcccactggagctcgtggtgcccccggagaccgtggtgagcctggtccccccggccctgctggctttgctggcccccctggtgctgacggccaacctggtgctaaaggcgaacctggtgatgctggtgccaaaggcgatgctggtccccctgggcctgccggacccgctggaccccctggccccattggtaatgttggtgctcctggagccaaaggtgctcgcggcagcgctggtccccctggtgctactggtttccctggtgctgctggccgagtcggtcctcctggcccctctggaaatgctggaccccctggccctcctggtcctgctggcaaagaaggcggcaaaggtccccgtggtgagactggccctgctggacgtcctggtgaagttggtccccctggtccccctggccctgctggcgagaaaggatcccctggtgctgatggtcctgctggtgctcctggtactcccgggcctcaaggtattgctggacagcgtggtgtggtcggcctgcctggtcagagaggagagagaggcttccctggtcttcctggcccctctggtgaacctggcaaacaaggtccctctggagcaagtggtgaacgtggtccccccggtcccatgggcccccctggattggctggaccccctggtgaatctggacgtgagggggctcctgctgccgaaggttcccctggacgagacggttctcctggcgccaagggtgaccgtggtgagaccggccccgctggaccccctggtgctcctggtgctcctggtgcccctggccccgttggccctgctggcaagagtggtgatcgtggtgagactggtcctgctggtcccgccggtcccgtcggccccgtcggcgcccgtggccccgccggaccccaaggcccccgtggtgacaagggtgagacaggcgaacagggcgacagaggcataaagggtcaccgtggcttctctggcctccagggtccccctggccctcctggctctcctggtgaacaaggtccctctggagcctctggtcctgctggtccccgaggtccccctggctctgctggtgctcctggcaaagatggactcaacggtctccctggccccattgggccccctggtcctcgcggtcgcactggtgatgctggtcctgttggtccccccggccctcctggacctcctggtccccctggtcctcccagcgctggtttcgacttcagcttcctgccccagccacctcaagagaaggctcacgatggtggccgctactaccgggctgatgatgccaatgtggttcgtgaccgtgacctcgaggtggacaccaccctcaagagcctgagccagcagatcgagaacatccggagcccagagggaagccgcaagaaccccgcccgcacctgccgtgacctcaagatgtgccactctgactggaagagtggagagtactggattgaccccaaccaaggctgcaacctggatgccatcaaagtcttctgcaacatggagactggtgagacctgcgtgtaccccactcagcccagtgtggcccagaagaactggtacatcagcaagaaccccaaggacaagaggcatgtctggttcggcgagagcatgaccgatggattccagttcgagtatggcggccagggctccgaccctgccgatgtggccatccagctgaccttcctgcgcctgatgtccaccgaggcctcccagaacatcacctaccactgcaagaacagcgtggcctacatggaccagcagactggcaacctcaagaaggccctgctcctcaagggctccaacgagatcgagatccgcgccgagggcaacagccgcttcacctacagcgtcactgtcgatggctgcacgagtcacaccggagcctggggcaagacagtgattgaatacaaaaccaccaagtcctcccgcctgcccatcatcgatgtggcccccttggacgttggtgccccagaccaggaattcggcttcgacgttggccctgtctgcttcctgtaaactccctccatcccaacctggctccctcccacccaaccaactttccccccaacccggaaacagacaagcaacccaaactgaacccccccaaaagccaaaaaatgggagacaatttcacatggactttggaaaatatttttttcctttgcattcatctctcaaacttagtttttatctttgaccaaccgaacatgaccaaaaaccaaaagtgcattcaaccttaccaaaaaaaaaaaaaaaaaaaaaagaataaataaataagtttttaaaaaaggaagcttggtccacttgcttgaagacccatgcgggggtaagtccctttctgcccgttgggttatgaaaccccaatgctgccctttctgctcctttctccacaccccccttggcctcccctccactccttcccaaatctgtctccccagaagacacaggaaacaatgtattgtctgcccagcaatcaaaggcaatgctcaaacacccaagtggcccccaccctcagcccgctcctgcccgcccagcacccccaggccctggggacctggggttctcagactgccaaagaagccttgccatctggcgctcccatggctcttgcaacatctccccttcgtttttgagggggtcatgccgggggagccaccagcccctcactgggttcggaggagagtcaggaagggccacgacaaagcagaaacatcggatttggggaacgcgtgtcatcccttgtgccgcaggctgggcgggagagactgttctgttctgttccttgtgtaactgtgttgctgaaagactacctcgttcttgtcttgatgtgtcaccggggcaactgcctgggggcggggatgggggcagggtggaagcggctccccatttttataccaaaggtgctacatctatgtgatgggtggggtggggagggaatcactggtgctatagaaattgagatgcccccccaggccagcaaatgttcctttttgttcaaagtctatttttattccttgatattttttctttctttttttttttttttgtggatggggacttgtgaatttttctaaaggtgctatttaacatgggaggagagcgtgtgcgctccagcccagcccgctgctcactttccaccctctctccacctgcctctggcttctcaggcctctgctctccgacctctctcctctgaaaccctcctccacagctgcagcccatcctcccggctccctcctagtctgtcctgcgtcctctgtccccgggtttcagagacaacttcccaaagcacaaagcagtttttccctaggggtgggaggaagcaaaagactctgtacctattttgtatgtgtataataatttgagatgtttttaattattttgattgctggaataaagcatgtggaaatgacccaaacataa

SEQ ID NO: 140 - DNA, 1722 bp, Homo sapiens
ggggaaaagagctaggaaagagctgcaaagcagtgtgggctttttccctttttttgctccttttcattacccctcctccgttttcacccttctccggacttcgcgtagaacctgcgaatttcgaagaggaggtggcaaagtgggagaaaagaggtgttagggtttggggtttttttgtttttgtttttgttttttaatttcttgatttcaacattttctcccaccctctcggctgcagccaacgcctcttacctgttctgcggcgccgcgcaccgctggcagctgagggttagaaagcggggtgtattttagattttaagcaaaaattttaaagataaatccatttttctctcccacccccaacgccatctccactgcatccgatctcattatttcggtggttgcttgggggtgaacaattttgtggctttttttcccctataattctgacccgctcaggcttgagggtttctccggcctccgctcactgcgtgcacctggcgctgccctgcttcccccaacctgttgcaaggctttaattcttgcaactgggacctgctcgcaggcaccccagccctccacctctctctacatttttgcaagtgtctgggggagggcacctgctctacctgccagaaattttaaaacaaaaacaaaaacaaaaaaatctccgggggccctcttggcccctttatccctgcactctcgctctcctgccccaccccgaggtaaagggggcgactaagagaagatggtgttgctcaccgcggtcctcctgctgctggccgcctatgcggggccggcccagagcctgggctccttcgtgcactgcgagccctgcgacgagaaagccctctccatgtgcccccccagccccctgggctgcgagctggtcaaggagccgggctgcggctgctgcatgacctgcgccctggccgaggggcagtcgtgcggcgtctacaccgagcgctgcgcccaggggctgcgctgcctcccccggcaggacgaggagaagccgctgcacgccctgctgcacggccgcggggtttgcctcaacgaaaagagctaccgcgagcaagtcaagatcgagagagactcccgtgagcacgaggagcccaccacctctgagatggccgaggagacctactcccccaagatcttccggcccaaacacacccgcatctccgagctgaaggctgaagcagtgaagaaggaccgcagaaagaagctgacccagtccaagtttgtcgggggagccgagaacactgcccacccccggatcatctctgcacctgagatgagacaggagtctgagcagggcccctgccgcagacacatggaggcttccctgcaggagctcaaagccagcccacgcatggtgccccgtgctgtgtacctgcccaattgtgaccgcaaaggattctacaagagaaagcagtgcaaaccttcccgtggccgcaagcgtggcatctgctggtgcgtggacaagtacgggatgaagctgccaggcatggagtacgttgacggggactttcagtgccacaccttcgacagcagcaacgttgagtgatgcgtccccccccaacctttccctcaccccctcccacccccagccccgactccagccagcgcctccctccaccccaggacgccactcatttcatctcatttaagggaaaaatatatatctatctatttgaggaaaaaaaaaaaaaaaaaaaa

SEQ ID NO: 141 - DNA, 1804 bp, Homo sapiens
gtatcactcagaatctggcagccagttccgtcctgacagagttcacagcatatattggtggattcttgtccatagtgcatctgctttaagaattaacgaaagcagtgtcaagacagtaaggattcaaaccatttgccaaaaatgagtctaagtgcatttactctcttcctggcattgattggtggtaccagtggccagtactatgattatgattttcccctatcaatttatgggcaatcatcaccaaactgtgcaccagaatgtaactgccctgaaagctacccaagtgccatgtactgtgatgagctgaaattgaaaagtgtaccaatggtgcctcctggaatcaagtatctttaccttaggaataaccagattgaccatattgatgaaaaggcctttgagaatgtaactgatctgcagtggctcattctagatcacaaccttctagaaaactccaagataaaagggagagttttctctaaattgaaacaactgaagaagctgcatataaaccacaacaacctgacagagtctgtgggcccacttcccaaatctctggaggatctgcagcttactcataacaagatcacaaagctgggctcttttgaaggattggtaaacctgaccttcatccatctccagcacaatcggctgaaagaggatgctgtttcagctgcttttaaaggtcttaaatcactcgaataccttgacttgagcttcaatcagatagccagactgccttctggtctccctgtctctcttctaactctctacttagacaacaataagatcagcaacatccctgatgagtatttcaagcgttttaatgcattgcagtatctgcgtttatctcacaacgaactggctgatagtggaatacctggaaattctttcaatgtgtcatccctggttgagctggatctgtcctataacaagcttaaaaacataccaactgtcaatgaaaaccttgaaaactattacctggaggtcaatcaacttgagaagtttgacataaagagcttctgcaagatcctggggccattatcctactccaagatcaagcatttgcgtttggatggcaatcgcatctcagaaaccagtcttccaccggatatgtatgaatgtctacgtgttgctaacgaagtcactcttaattaatatctgtatcctggaacaatattttatggttatgtttttctgtgtgtcagttttcatagtatccatattttattactgtttattacttccatgaattttaaaatctgagggaaatgttttgtaaacatttattttttttaaagaaaagatgaaaggcaggcctatttcatcacaagaacacacacatatacacgaatagacatcaaactcaatgctttatttgtaaatttagtgtttttttatttctactgtcaaatgatgtgcaaaaccttttactggttgcatggaaatcagccaagttttataatccttaaatcttaatgttcctcaaagcttggattaaatacatatggatgttactctcttgcaccaaattatcttgatacattcaaatttgtctggttaaaaaataggtggtagatattgaggccaagaatattgcaaaatacatgaagcttcatgcacttaaagaagtatttttagaataagaatttgcatacttacctagtgaaacttttctagaattatttttcactctaagtcatgtatgtttctctttgattatttgcatgttatgtttaataagctactagcaaaataaaacatagcaaatgaaaaaaaaaaaaaaaaaaaaaaaaaaaaaaaa

SEQ ID NO: 142 - DNA, 5489 bp, Homo sapiens; identical to SEQ ID NO: 96

SEQ ID NO: 143 - DNA, 2517 bp, Homo sapiens
ggcacgagggtgagccggagagggtgaagcaggcaggaagctgcaggccggcggtggatggggccaggaagcatgcagggggagtgaggaccgtgtatgagagaaacactgcccaagagagaagaaagaaaatcacaggacccgaggaaaaagaatgagtggtgtgttcagagatgacacatgacaacaaattgtttgcttggaggattttcttacgcgtgcgtgtttaaactggcctcaaggaggaagaagaaacatgcgttcctggatgactgagttctggaatattctgtcataagactttgcaactggagtagccccagaaaaaggcaggcagtgggagttggctccctccccaaagccatccctgagttggctttgttttgggttcctcccaggtggaatttaggcaaaacttacagtattgttctgggatctgggcaagttgtgttggggatggacatgggtctcagagagatgtgcgttggcgagaaacggacagtgatcattccgcctcacctgggctatggggaagctggcgtggatggagaagtgcccggcagtgccgtattagtgtttgacattgagctgctggagctggtggctggccttcccgaggggtacatgttcatatggaatggtgaggtgtcacccaacctttttgaagaaattgacaaggatggcaacggagaagtcctcctggaagagttctcagagtacattcacgcccaggtggcatctggcaaagggaaactcgctcctggctttgatgctgagctgattgtgaagaatatgttcaccaaccaggaccggaatggagatgggaaggtcacagctgaggaatttaaactcaaagaccaggaagccaaacaggatgaactctaaacctggcacgaaccagatggtgccagggagtacgtgacaccaagccaactgtgtggcagaacgtgcagtgagggtgcaagggtctttcagaagttgcatcattagccagtagtaggtgggtcacatagtacctggtgtacacatcggggtgggttgatatatggggtgagaagtttaggctgatcgccagtgatagtaaacaaaatctgtgcagagggccttagcatgggatgtgtccagtattgaaaaggctgcactgccaaccatgatttgtgaaccttctgggaaattttgttattaaaagaatatatagtgtcagacggaagttataatcatcttggaggaaccataagaaaaagtgtccagggtatctatataaagagggttaaatttttttttaacttgctggttaaaacattttagaaatattcttgagatgggcaggagagtcaaagggcttgcttgccccagcagagttcccagcagacagccatggctcttcccagcagcctgtgcaaattctgatgatgaccccacccccgcacacgcacacgcacatcatgcttttccagctcatcacaccccgccccactatgggcctaccattaatagtgtatatcttggaggttaaaagagccttttggacagaaaactgggccaggaaaaggcatctcagaccacaaatagagaatttgattcctcatttgccacataagtcatctgcttagcttttcctttctttttttttttttttttttttttggaggcagagtctccgtttgtcgccaggctggagtgcagtggtgccatctcggctcactgcagcactgtctcggctcactgcagcctccgcctcccgtattcaagcgattctcctgtctcagcctcctgagtagctaggactacaggtgtgcaccaccacgccccgctaatttttgtatttttggtagagacggggtttcaccgtgttggccaggatggtctcaatctcgacctcgtgatccgcccacctcggcctcccaaagtgttgggattacaggcatgaatcaccatgcctagccacttagttttttgtcattcccacctttctatcccatagaacactcttttttatcttccctgaaccatattgatgagataaatagggctgggggctgggccccgctggtcactcaacagagtatttcccttggccgagatggaagttttgtcccaatagatgagctgctgagcatcaacaaggtgacatttttctgctgcccatttgtgtcctggagacggtggtaccctgaaggcagaggccagctgctgcaagacagcaatgacagtccacctgccggcctgattcctgcatcatggaataaccacatggctaccttctatcctctgttcccaaatggtggtggcacttatcctgaagtcatcaatgatttccctttgaaactactttattttactaatttaaactattttgtactgatgtagccctgaggtagttcatgaaaatgctgtgcactcattccatggaataaatgttggaaagctgatcttttctgatataaaatgttgaattataaaaaaaaaaaaaaaaaaaaaaaaaaaaaaaaaaaaaaaaaaaaaaaaaaaaaaaaa

SEQ ID NO: 144 - DNA, 1396 bp, Homo sapiens
gcgggggaagctggcgggctgaggcgccccgctcttctcctctgccccgggcccgcgaggccacgcgtcgccgctcgagagatgatgcaggacgtgtccagctcgccagtctcgccggccgacgacagcctgagcaacagcgaggaagagccagaccggcagcagccgccgagcggcaagcgcgggggacgcaagcggcgcagcagcaggcgcagcgcgggcggcggcgcggggcccggcggagccgcgggtgggggcgtcggaggcggcgacgagccgggcagcccggcccagggcaagcgcggcaagaagtctgcgggctgtggcggcggcggcggcgcgggcggcggcggcggcagcagcagcggcggcgggagtccgcagtcttacgaggagctgcagacgcagcgggtcatggccaacgtgcgggagcgccagcgcacccagtcgctgaacgaggcgttcgccgcgctgcggaagatcatccccacgctgccctcggacaagctgagcaagattcagaccctcaagctggcggccaggtacatcgacttcctctaccaggtcctccagagcgacgagctggactccaagatggcaagctgcagctatgtggctcacgagcggctcagctacgccttctcggtctggaggatggagggggcctggtccatgtccgcgtcccactagcaggcggagccccccaccccctcagcagggccggagacctagatgtcattgtttccagagaaggagaaaatggacagtctagagactctggagctggataactaaaaataaaaatatatgccaaagattttcttggaaattagaagagcaaaatccaaattcaaagaaacagggcgtggggcgcacttttaaaagagaaagcgagacaggcccgtggacagtgattcccagacgggcagcggcaccatcctcacacctctgcattctgatagaagtctgaacagttgtttgtgttttttttttttttttttttgacgaagaatgtttttatttttatttttttcatgcatgcattctcaagaggtcgtgccaatcagccactgaaaggaaaggcatcactatggactttctctattttaaaatggtaacaatcagaggaactataagaacacctttagaaataaaaatactgggatcaaactggcctgcaaaaccatagtcagttaattctttttttcatccttcctctgaggggaaaaacaaaaaaaaacttaaaatacaaaaaacaacattctatttatttattgaggacccatggtaaaatgcaaatagatccggtgtctaaatgcattcatatttttatgattgttttgtaaatatctttgtatatttttctgcaataaataaatataaaaaatttagagaa

SEQ ID NO: 145 - DNA, 1362 bp, Homo sapiens
catttggggacgctctcagctctcggcgcacggcccagcttccttcaaaatgtctactgttcacgaaatcctgtgcaagctcagcttggagggtgatcactctacacccccaagtgcatatgggtctgtcaaagcctatactaactttgatgctgagcgggatgctttgaacattgaaacagccatcaagaccaaaggtgtggatgaggtcaccattgtcaacattttgaccaaccgcagcaatgcacagagacaggatattgccttcgcctaccagagaaggaccaaaaaggaacttgcatcagcactgaagtcagccttatctggccacctggagacggtgattttgggcctattgaagacacctgctcagtatgacgcttctgagctaaaagcttccatgaaggggctgggaaccgacgaggactctctcattgagatcatctgctccagaaccaaccaggagctgcaggaaattaacagagtctacaaggaaatgtacaagactgatctggagaaggacattatttcggacacatctggtgacttccgcaagctgatggttgccctggcaaagggtagaagagcagaggatggctctgtcattgattatgaactgattgaccaagatgctcgggatctctatgacgctggagtgaagaggaaaggaactgatgttcccaagtggatcagcatcatgaccgagcggagcgtgccccacctccagaaagtatttgataggtacaagagttacagcccttatgacatgttggaaagcatcaggaaagaggttaaaggagacctggaaaatgctttcctgaacctggttcagtgcattcagaacaagcccctgtattttgctgatcggctgtatgactccatgaagggcaaggggacgcgagataaggtcctgatcagaatcatggtctcccgcagtgaagtggacatgttgaaaattaggtctgaattcaagagaaagtacggcaagtccctgtactattatatccagcaagacactaagggcgactaccagaaagcgctgctgtacctgtgtggtggagatgactgaagcccgacacggcctgagcgtccagaaatggtgctcaccatgcttccagctaacaggtctagaaaaccagcttgcgaataacagtccccgtggccatccctgtgagggtgacgttagcattacccccaacctcattttagttgcctaagcattgcctggccttcctgtctagtctctcctgtaagccaaagaaatgaacattccaaggagttggaagtgaagtctatgatgtgaaacactttgcctcctgtgtactgtgtcataaacagatgaataaactgaatttgtacttt

SEQ ID NO: 146 - DNA, 6319 bp, Homo sapiens
acacagtactctcagcttgttggtggaagcccctcatctgccttcattctgaaggcagggcccggcagaggaaggatcagagggtcgcggccggagggtcccggccggtggggccaactcagagggagaggaaagggctagagacacgaagaacgcaaaccatcaaatttagaagaaaaagccctttgactttttccccctctccctccccaatggctgtgtagcaaacatccctggcgataccttggaaaggacgaagttggtctgcagtcgcaatttcgtgggttgagttcacagttgtgagtgcggggctcggagatggagccgtggtcctctaggtggaaaacgaaacggtggctctgggatttcaccgtaacaaccctcgcattgaccttcctcttccaagctagagaggtcagaggagctgctccagttgatgtactaaaagcactagattttcacaattctccagagggaatatcaaaaacaacgggattttgcacaaacagaaagaattctaaaggctcagatactgcttacagagtttcaaagcaagcacaactcagtgccccaacaaaacagttatttccaggtggaactttcccagaagacttttcaatactatttacagtaaaaccaaaaaaaggaattcagtctttccttttatctatatataatgagcatggtattcagcaaattggtgttgaggttgggagatcacctgtttttctgtttgaagaccacactggaaaacctgccccagaagactatcccctcttcagaactgttaacatcgctgacgggaagtggcatcgggtagcaatcagcgtggagaagaaaactgtgacaatgattgttgattgtaagaagaaaaccacgaaaccacttgatagaagtgagagagcaattgttgataccaatggaatcacggtttttggaacaaggattttggatgaagaagtttttgagggggacattcagcagtttttgatcacaggtgatcccaaggcagcatatgactactgtgagcattatagtccagactgtgactcttcagcacccaaggctgctcaagctcaggaacctcagatagatgagtatgcaccagaggatataatcgaatatgactatgagtatggggaagcagagtataaagaggctgaaagtgtaacagagggacccactgtaactgaggagacaatagcacagacggaggcaaacatcgttgatgattttcaagaatacaactatggaacaatggaaagttaccagacagaagctcctaggcatgtttctgggacaaatgagccaaatccagttgaagaaatatttactgaagaatatctaacgggagaggattatgattcccagaggaaaaattctgaggatacactatatgaaaacaaagaaatagacggcagggattctgatcttctggtagatggagatttaggcgaatatgatttttatgaatataaagaatatgaagataaaccaacaagcccccctaatgaagaatttggtccaggtgtaccagcagaaactgatattacagaaacaagcataaatggccatggtgcatatggagagaaaggacagaaaggagaaccagcagtggttgagcctggtatgcttgtcgaaggaccaccaggaccagcaggacctgcaggtattatgggtcctccaggtctacaaggccccactggaccccctggtgaccctggcgataggggccccccaggacgtcctggcttaccaggggctgatggtctacctggtcctcctggtactatgttgatgttaccgttccgttatggtggtgatggttccaaaggaccaaccatctctgctcaggaagctcaggctcaagctattcttcagcaggctcggattgctctgagaggcccacctggcccaatgggtctaactggaagaccaggtcctgtgggggggcctggttcatctggggccaaaggtgagagtggtgatccaggtcctcagggccctcgaggcgtccagggtccccctggtccaacgggaaaacctggaaaaaggggtcgtccaggtgcagatggaggaagaggaatgccaggagaacctggggcaaagggagatcgagggtttgatggacttccgggtctgccaggtgacaaaggtcacaggggtgaacgaggtcctcaaggtcctccaggtcctcctggtgatgatggaatgaggggagaagatggagaaattggaccaagaggtcttccaggtgaagctggcccacgaggtttgctgggtccaaggggaactccaggagctccagggcagcctggtatggcaggtgtagatggccccccaggaccaaaagggaacatgggtccccaaggggagcctgggcctccaggtcaacaagggaatccaggacctcagggtcttcctggtccacaaggtccaattggtcctcctggtgaaaaaggaccacaaggaaaaccaggacttgctggacttcctggtgctgatgggcctcctggtcatcctgggaaagaaggccagtctggagaaaagggggctctgggtccccctggtccacaaggtcctattggatacccgggcccccggggagtaaagggagcagatggtgtcagaggtctcaagggatctaaaggtgaaaagggtgaagatggttttccaggattcaaaggtgacatgggtctaaaaggtgacagaggagaagttggtcaaattggcccaagaggggaagatggccctgaaggacccaaaggtcgagcaggcccaactggagacccaggtccttcaggtcaagcaggagaaaagggaaaacttggagttccaggattaccaggatatccaggaagacaaggtccaaagggttccactggattccctgggtttccaggtgccaatggagagaaaggtgcacggggagtagctggcaaaccaggccctcggggtcagcgtggtccaacgggtcctcgaggttcaagaggtgcaagaggtcccactgggaaacctgggccaaagggcacttcaggtggcgatggccctcctggccctccaggtgaaagaggtcctcaaggacctcagggtccagttggattccctggaccaaaaggccctcctggaccaccaggaaggatgggctgcccaggacaccctgggcaacgtggggagactggatttcaaggcaagaccggccctcctgggccagggggagtggttggaccacagggaccaaccggtgagactggtccaataggggaacgtgggcatcctggccctcctggccctcctggtgagcaaggtcttcctggtgctgcaggaaaagaaggtgcaaagggtgatccaggtcctcaaggtatctcagggaaagatggaccagcaggattacgtggtttcccaggggaaagaggtcttcctggagctcagggtgcacctggactgaaaggaggggaaggtccccagggcccaccaggtccagttggctcaccaggagaacgtgggtcagcaggtacagctggcccaattggtttaccagggcgcccgggacctcagggtcctcctggtccagctggagagaaaggtgctcctggagaaaaaggtccccaagggcctgcagggagagatggagttcaaggtcctgttggtctcccagggccagctggtcctgccggctcccctggggaagacggagacaagggtgaaattggtgagccgggacaaaaaggcagcaagggtgacaagggagaaaatggccctcccggtcccccaggtcttcaaggaccagttggtgcccctggaattgctggaggtgatggtgaaccaggtcctagaggacagcaggggatgtttgggcaaaaaggtgatgagggtgccagaggcttccctggacctcctggtccaataggtcttcagggtctgccaggcccacctggtgaaaaaggtgaaaatggggatgttggtccatgggggccacctggtcctccaggcccaagaggccctcaaggtcccaatggagctgatggaccacaaggacccccaggttctgttggttcagttggtggtgttggagaaaagggtgaacctggagaagcaggaaacccagggcctcctggggaagcaggtgtaggcggtcccaaaggagaaagaggagagaaaggggaagctggtccacctggagctgctggacctccaggtgccaaggggccgccaggtgatgatggccctaagggtaacccgggtcctgttggttttcctggagatcctggtcctcctggggaacttggccctgcaggtcaagatggtgttggtggtgacaagggtgaagatggagatcctggtcaaccgggtcctcctggcccatctggtgaggctggcccaccaggtcctcctggaaaacgaggtcctcctggagctgcaggtgcagagggaagacaaggtgaaaaaggtgctaagggggaagcaggtgcagaaggtcctcctggaaaaaccggcccagtcggtcctcagggacctgcaggaaagcctggtccagaaggtcttcggggcatccctggtcctgtgggagaacaaggtctccctggagctgcaggccaagatggaccacctggtcctatgggacctcctggcttacctggtctcaaaggtgaccctggctccaagggtgaaaagggacatcctggtttaattggcctgattggtcctccaggagaacaaggggaaaaaggtgaccgagggctccctggaactcaaggatctccaggagcaaaaggggatgggggaattcctggtcctgctggtcccttaggtccacctggtcctccaggcttaccaggtcctcaaggcccaaagggtaacaaaggctctactggacccgctggccagaaaggtgacagtggtcttccagggcctcctgggcctccaggtccacctggtgaagtcattcagcctttaccaatcttgtcctccaaaaaaacgagaagacatactgaaggcatgcaagcagatgcagatgataatattcttgattactcggatggaatggaagaaatatttggttccctcaattccctgaaacaagacatcgagcatatgaaatttccaatgggtactcagaccaatccagcccgaacttgtaaagacctgcaactcagccatcctgacttcccagatggtgaatattggattgatcctaaccaaggttgctcaggagattccttcaaagtttactgtaatttcacatctggtggtgagacttgcatttatccagacaaaaaatctgagggagtaagaatttcatcatggccaaaggagaaaccaggaagttggtttagtgaatttaagaggggaaaactgctttcatacttagatgttgaaggaaattccatcaatatggtgcaaatgacattcctgaaacttctgactgcctctgctcggcaaaatttcacctaccactgtcatcagtcagcagcctggtatgatgtgtcatcaggaagttatgacaaagcacttcgcttcctgggatcaaatgatgaggagatgtcctatgacaataatccttttatcaaaacactgtatgatggttgtacgtccagaaaaggctatgaaaagactgtcattgaaatcaatacaccaaaaattgatcaagtacctattgttgatgtcatgatcaatgactttggtgatcagaatcagaagttcggatttgaagttggtcctgtttgttttcttggctaagattaagacaaagaacatatcaaatcaacagaaaatataccttggtgccaccaacccattttgtgccacatgcaagttttgaataaggatggtatagaaaacaacgctgcatatacaggtaccatttaggaaataccgatgcctttgtgggggcagaatcacatggcaaaagctttgaaaatcataaagatataagttggtgtggctaagatggaaacagggctgattcttgattcccaattctcaactctccttttcctatttgaatttctttggtgctgtagaaaacaaaaaaagaaaaatatatattcataaaaaatatggtgctcattctcatccatccaggatgtactaaaacagtgtgtttaataaattgtaattattttgtgtacagttctatactgttatctgtgtccatttccaaaacttgcacgtgtccctgaattccatctgactctaattttatgagaattgcagaactctgatggcaataaatatatgtattatgaaaaaataaagttgtaatttctgatgactctaagtccctttctttggttaataataaaatgcctttgtatat

SEQ ID NO: 147 - DNA, 3401 bp, Homo sapiens
ggcacgagggcggagccagcccctcccctacccggagcagcccgctggggccgtcccgagcggcgacacactaggagtcccggccggccagccagggcagccgcggtcccgggactcggccgtgagtgctgcgggacggatggtggcggcggggcgcgggccagcgcgggcgccgtgagccggagctgcgcgcggggcatgcggctgcggcccccggccctcggcccccgcgctccggccccagccccggccgccggcccccgcggagtgcagcgaccgcgccgccgctgagggaggcgccccaccatgccgcgggccccggcgccgctgtacgcctgcctcctggggctctgcgcgctcctgccccggctcgcaggtctcaacatatgcactagtggaagtgccacctcatgtgaagaatgtctgctaatccacccaaaatgtgcctggtgctccaaagaggacttcggaagcccacggtccatcacctctcggtgtgatctgagggcaaaccttgtcaaaaatggctgtggaggtgagatagagagcccagccagcagcttccatgtcctgaggagcctgcccctcagcagcaagggttcgggctctgcaggctgggacgtcattcagatgacaccacaggagattgccgtgaacctccggcccggtgacaagaccaccttccagctacaggttcgccaggtggaggactatcctgtggacctgtactacctgatggacctctccctgtccatgaaggatgacttggacaatatccggagcctgggcaccaaactcgcggaggagatgaggaagctcaccagcaacttccggttgggatttgggtcttttgttgataaggacatctctcctttctcctacacggcaccgaggtaccagaccaatccgtgcattggttacaagttgtttccaaattgcgtcccctcctttgggttccgccatctgctgcctctcacagacagagtggacagcttcaatgaggaagttcggaaacagagggtgtcccggaaccgagatgcccctgaggggggctttgatgcagtactccaggcagccgtctgcaaggagaagattggctggcgaaaggatgcactgcatttgctggtgttcacaacagatgatgtgccccacatcgcattggatggaaaattgggaggcctggtgcagccacacgatggccagtgccacctgaacgaggccaacgagtacactgcatccaaccagatggactatccatcccttgccttgcttggagagaaattggcagagaacaacatcaacctcatctttgcagtgacaaaaaaccattatatgctgtacaagaattttacagccctgatacctggaacaacggtggagattttagatggagactccaaaaatattattcaactgattattaatgcatacaatagtatccggtctaaagtggagttgtcagtctgggatcagcctgaggatcttaatctcttctttactgctacctgccaagatggggtatcctatcctggtcagaggaagtgtgagggtctgaagattggggacacggcatcttttgaagtatcattggaggcccgaagctgtcccagcagacacacggagcatgtgtttgccctgcggccggtgggattccgggacagcctggaggtgggggtcacctacaactgcacgtgcggctgcagcgtggggctggaacccaacagtgccaggtgcaacgggagcgggacctatgtctgcggcctgtgtgagtgcagccccggctacctgggcaccaggtgcgagtgccaggatggggagaaccagagcgtgtaccagaacctgtgccgggaggcagagggcaagccactgtgcagcgggcgtggggactgcagctgcaaccagtgctcctgcttcgagagcgagttcggcaagatctatgggcctttctgtgagtgcgacaacttctcctgtgccaggaacaagggagtcctctgctcaggccatggcgagtgtcactgcggggaatgcaagtgccatgcaggttacatcggggacaactgtaactgctcgacagacatcagcacatgccggggcagagatggccagatctgcagcgagcgtgggcactgtctctgtgggcagtgccaatgcacggagccgggggcctttggggagatgtgtgagaagtgccccacctgcccggatgcatgcagcaccaagagagattgcgtcgagtgcctgctgctccactctgggaaacctgacaaccagacctgccacagcctatgcagggatgaggtgatcacatgggtggacaccatcgtgaaagatgaccaggaggctgtgctatgtttctacaaaaccgccaaggactgcgtcatgatgttcacctatgtggagctccccagtgggaagtccaacctgaccgtcctcagggagccagagtgtggaaacacccccaacgccatgaccatcctcctggctgtggtcggtagcatcctccttgttgggcttgcactcctggctatctggaagctgcttgtcaccatccacgaccggagggagtttgcaaagtttcagagcgagcgatccagggcccgctatgaaatggcttcaaatccattatacagaaagcctatctccacgcacactgtggacttcaccttcaacaagttcaacaaatcctacaatggcactgtggactgatgtttccttctccgaggggctggagcggggatctgatgaaaaggtcagactgaaacgccttgcacggctgctcggcttgatcacagctccctaggtaggcaccacagagaagaccttctagtgagcctgggccaggagcccacagtgcctgtacaggaaggtgcctggccatgtcacctggctgctaggccagagccatgccaggctgcgtccctccgagcttgggataaagcaaggggaccttggcactctcagctttccctgccacatccagcttgttgtcccaatgaaatactgagatgctgggctgtctctcccttccaggaatgctgggcccccagcctggccagacaagacgactgtcaggaagggtcggagtctgtaaaaccagcatacagtttggcttttttcacattgatcatttttatatgaaataaaaagatcctgcatttatggtgtagttctgagtcctgagacttttccgcgtgatggctatgccttgcacacaggtgttggtgatggggctgttgagatgcctgttgaaggtacatcgtttgcaaatgtcagtttcctctcctgtccgtgtttgtttagtacttttataatgaaaagaaacaagattgtttgggattggaagtaaagattaaaaccaaaagaatttgtgtttgtctgataaaaaaaaaaaaaaaaaaaaa

SEQ ID NO: 148 - DNA, 6217 bp, Homo sapiens
cgcagactgtgctggagctggtgctgaaaaagggggtttgcagaggctgccctggggctggtgctgaaagaagagcccacagctgacttcatggtgctacaataacctcagaatctacttttcactctcaggagaacccacagtctaatatttagacatgatggcaaactgggcggaagcaagacctctcctcattcttattgttttattagggcaatttgtctcaataaaagcccaggaagaagacgaggatgaaggatatggtgaagaaatagcctgcactcagaatggccagatgtacttaaacagggacatttggaaacctgccccttgtcagatctgtgtctgtgacaatggagccattctctgtgacaagatagaatgccaggatgtgctggactgtgccgaccctgtaacgccccctggggaatgctgtcctgtctgttcacaaacacctggaggtggcaatacaaattttggtagaggaagaaagggacaaaagggagaaccaggattagtgcctgttgtaacaggcatacgtggtcgtccaggaccggcaggacctccaggatcacagggaccaagaggagagcgagggccaaaaggaagacctggccctcgtggacctcagggaattgatggagaaccaggtgttcctggtcaacctggtgctccaggacctcctggacatccgtcccacccaggacccgatggcttgagcaggccgttttcagctcaaatggctgggttggatgaaaaatctggacttgggagtcaagtaggactaatgcctggctctgtgggtcctgttggcccaaggggaccacagggtttacaaggacagcaaggtggtgcaggacctacaggacctcctggtgaacctggtgatcctggaccaatgggtccgattggttcacgtggaccagagggccctcctggtaaacctggggaagatggtgaacctggcagaaatggaaatcctggtgaagtgggatttgcaggatctccgggagctcgtggatttcctggggctcctggtcttccaggtctgaagggtcaccgaggacacaaaggtcttgaaggccctaaaggtgaagttggagcacctggttccaagggtgaagctggccccactggtccaatgggtgccatgggtcctctgggtccgaggggaatgccaggagagagagggagacttgggccacagggtgctcctggacaacgaggtgcacatggtatgcctggaaaacctggaccaatgggtcctcttgggataccaggctcttctggttttccaggaaatcctggaatgaagggagaagcaggtcctacaggggcgcgaggccctgaaggtcctcaggggcagagaggtgaaactgggcccccaggtccagttggctctccaggtcttcctggtgcaataggaactgatggtactcctggtcccaaaggcccaacgggctctccgggtacctctggtcctcctggctcagcagggcctcctggatctccaggacctcagggtagcactggtcctcaggggaattcgggccttccgggtgatccaggtttcaaaggagaagctggcccaaaaggggaaccagggccacatggtattcagggtccgataggcccacccggtgaagaaggcaaaagaggtcccagaggtgacccaggaacacttggtcctccagggccagtgggagaaaggggtgctcctggcaatcgtggttttccaggctctgatggtttacctgggccaaagggtgctcaaggagaacggggtcctgtaggttcttcaggacccaaaggaagccagggggatccaggacgtccaggggaacctgggcttccaggtgctcggggtttgacaggaaatcctggtgttcaaggtcctgaaggaaaacttggacctttgggtgcgccaggggaagatggccgtccaggtcctccaggctccataggaatcaaagggcagcccgggaccatgggccttccaggccccaaaggtagcaatggtgaccctgggaaacctggagaagcaggaaatcctggagttcctgggcaaaggggagctcctggaaaagatggtaaagttggtccttatggtcctcctgggccgccgggtctacgtggtgaaagaggagaacaaggacctccagggcccacaggttttcaggggcatcctggtcctccaggtcctcctggagaaggtggaaaaccaggtgatcaaggtgttcctggaggtcccggagcagttggcccgttaggacctagaggagaacgaggaaatcctggggaaagaggagaacctgggataactggactccctggtgagaagggaatggctggaggacatggtcctgatggcccaaaaggcagtccaggtccatctgggacccctggagatacaggcccaccaggtcttcaaggtatgccgggagaaagaggaattgcaggaactcctggccccaagggtgacagaggtggcataggagaaaaaggtgctgaaggcacagctggaaatgatggtgcaggaggtcttccaggtcctttgggccctccaggtccggcaggcctactgggagaaaagggtgaacctggtcctcgaggtttagttggtcctcctggctcccggggcaatcctggttctcgaggtgaaaatgggccaactggagctgttggttttgccggaccccaggggtctgacggacagcctggagtaaaaggtgaacctggagagccaggacagaagggagatgctggttctcctggaccacaaggtttagcaggatcccctggccctcatggtcctaatggtgttcctggactaaaaggtggtcgaggaacccaaggtccgcctggtgctacaggatttcctggttctgcgggcagagttggacctccaggccctgctggagctccaggacctgcgggacccctaggggaacccgggaaggagggacctccaggtcctcgtggggaccctggctctcatgggcgtgtgggagtccgaggaccagctggcccccctggtggcccaggagacaaaggggacccaggagaagatgggcaacctggtccagatggcccccctggtccagctggaacgaccgggcagagaggaattgttggcatgcctgggcaacgtggagagagaggcatgcccggcctaccaggcccagcgggaacaccaggaaaagtaggaccaactggtgcaacaggagataaaggtccacctggacctgtggggcccccaggctccaatggtcctgtaggggaacctggaccagaaggtccagctggcaatgatggtaccccaggacgggatggtgctgttggagaacgtggtgatcgtggagaccctgggcctgcaggtctgccaggctctcagggtgcccctggaactcctggccctgtgggtgctccaggagatgcaggacaaagaggagatccgggttctcggggtcctataggacacctgggtcgagctggaaaacgtggattacctggaccccaaggacctcgtggtgacaaaggtgatcatggagaccgaggcgacagaggtcagaagggccacagaggctttactggtcttcagggtcttcctggccctcctggtccaaatggtgaacaaggaagtgctggaatccctggaccatttggcccaagaggtcctccaggcccagttggtccttcaggtaaagaaggaaaccctgggccacttgggccattgggacctccaggtgtacgaggcagtgtaggagaagcaggacctgagggccctcctggtgagcctggcccacctggccctccgggtccccctggccaccttacagctgctcttggggatatcatggggcactatgatgaaagcatgccagatccacttcctgagtttactgaagatcaggcggctcctgatgacaaaaacaaaacggacccaggggttcatgctaccctgaagtcactcagtagtcagattgaaaccatgcgcagccccgatggctcgaaaaagcacccagcccgcacgtgtgatgacctaaagctttgccattccgcaaagcagagtggtgaatactggattgatcctaaccaaggatctgttgaagatgccatcaaagtttactgcaacatggaaacaggagaaacatgtatttcagcaaacccatccagtgtaccacgtaaaacctggtgggccagtaaatctcctgacaataaacctgtttggtatggtcttgatatgaacagagggtctcagttcgcttatggagaccaccaatcacctaatacagccattactcagatgacttttttgcgccttttatcaaaagaagcctcccagaacatcacttacatctgtaaaaacagtgtaggatacatggacgatcaagctaagaacctcaaaaaagctgtggttctcaaaggggcaaatgacttagatatcaaagcagagggaaatattagattccggtatatcgttcttcaagacacttgctctaagcggaatggaaatgtgggcaagactgtctttgaatatagaacacagaatgtggcacgcttgcccatcatagatcttgctcctgtggatgttggcggcacagaccaggaattcggcgttgaaattgggccagtttgttttgtgtaaagtaagccaagacacatcgacaatgagcaccaccatcaatgaccaccgccattcacaagaactttgactgtttgaagttgatcctgagactcttgaagtaatggctgatcctgcatcagcattgtatatatggtcttaagtgcctggcctccttatccttcagaatatttattttacttacaatcctcaagttttaattgattttaaatatttttcaatacaacagtttaggtttaagatgaccaatgacaatgaccacctttgcagaaagtaaactgattgaataaataaatctccgttttcttcaatttatttcagtgtaatgaaaaagttgcttagtatttatgaggaaattcttcttcctggcaggtagcttaaagagtggggtatatagagccacaacacatgtttattttgcttggctgcagttgaaaaatagaaattagtgcccttttgtgacctctcattccaagattgtcaattaaaaatgagtttaaaatgtttaacttgtgatcgagacctacatgcatgtcttgatattgtgtaactataatagagactctttaaggagaatcttaaaaaaaaaaaacgtttctcactgtcttaaatagaatttttaaatagtatatattcagtggcattttggagaacaaagtgaatttacttcgacttcttaaatttttgtaaaagactataagtttagacatctttctcattcaaatttaaagatatctttctcctcttgatcaatctatcaatattgatagaagtcacactagtatataccatttaatacatttacactttcttatttaagaagatattgaatgcaaaataattgacatatagaactttacaaacatatgtccaaggactctaaattgagactcttccacatgtacaatctcatcatcctgaagcctataatgaagaaaaagatctagaaactgagttgtggagctgactctaatcaaatgtgatgattggaattagaccatttggcctttgaactttcataggaaaaatgacccaacatttcttagcatgagctacctcatctctagaagctgggatggacttactattcttgtttatattttagatactgaaaggtgctatgcttctgttattattccaagactggagataggcagggctaaaaaggtattattatttttcctttaatgatggtgctaaaattcttcctataaaattccttaaaaataaagatggtttaatcactaccattgtgaaaacataactgttagacttcccgtttctgaaagaaagagcatcgttccaatgcttgttcactgttcctctgtcatactgtatctggaatgctttgtaatacttgcatgcttcttagaccagaacatgtaggtccccttgtgtctcaatactttttttttcttaattgcatttgttggctctattttaatttttttcttttaaaataaacagctgggaccatcccaaaagacaagccatgcatacaactttggtcatgtatctctgcaaagcatcaaattaaatgcacgcttttgtcatgtcaaaaaaaaaaaaaaa

SEQ ID NO: 149 - DNA, 2129 bp, Homo sapiens
ggcacgagggctgcccgggctgcgcggcgtctgcaggcgccaccgctgcctctttccggctgtgaccctcctcgccggcgccgcttggctgcgtcctccgactccccgcgccgccgagaccaggctcccgctccggttgcggccgcaccgccctccgcggccgccccctggggatccagcgagcgcggtcgtccttggtggaaggaaccatgaactggcatctccccctcttcctcttggcctctgtgacgctgccttccatctgctcccacttcaatcctctgtctctcgaggaactaggctccaacacggggatccaggttttcaatcagattgtgaagtcgaggcctcatgacaacatcgtgatctctccccatgggattgcgtcggtcctggggatgcttcagctgggggcggacggcaggaccaagaagcagctcgccatggtgatgagatacggcgtaaatggagttggtaaaatattaaagaagatcaacaaggccatcgtctccaagaagaataaagacattgtgacagtggctaacgccgtgtttgttaagaatgcctctgaaattgaagtgccttttgttacaaggaacaaagatgtgttccagtgtgaggtccggaatgtgaactttgaggatccagcctctgcctgtgattccatcaatgcatgggttaaaaatgaaaccagggatatgattgacaatctgctgtccccagatcttattgatggtgtgctcaccagactggtcctcgtcaacgcagtgtatttcaagggtctgtggaaatcacggttccaacccgagaacacaaagaaacgcactttcgtggcagccgacgggaaatcctatcaagtgccaatgctggcccagctctccgtgttccggtgtgggtcgacaagtgcccccaatgatttatggtacaacttcattgaactgccctaccacggggaaagcatcagcatgctgattgcactgccgactgagagctccactccgctgtctgccatcatcccacacatcagcaccaagaccatagacagctggatgagcatcatggtgcccaagagggtgcaggtgatcctgcccaagttcacagctgtagcacaaacagatttgaaggagccgctgaaagttcttggcattactgacatgtttgattcatcaaaggcaaattttgcaaaaataacaacagggtcagaaaacctccatgtttctcatatcttgcaaaaagcaaaaattgaagtcagtgaagatggaaccaaagcttcagcagcaacaactgcaattctcattgcaagatcatcgcctccctggtttatagtagacagaccttttctgtttttcatccgacataatcctacaggtgctgtgttattcatggggcagataaacaaaccctgaagagtatacaaaagaaaccatgcaaagcaacgactactttgctacgaagaaagactcctttcctgcatctttcatagttctgttaaatatttttgtacatcgcttctttttcaaaactagttcttaggaacagactcgatgcaagtgtttctgttctgggaggtattggagggaaaaaacagcaggatggctggaacactgtactgaggaatgaatagaaaggcttccagatgtctaaaagattctttaaactactgaactgttacctaggttaacaaccctgttgagtatttgctgtttgtccagttcaggaatttttgttttgttttgtctatatgtgcggcttttcagaagaaatttaatcagtgtgacagaaaaaaaaaatgttttatggtagcttttactttttatgaaaaaaaaattatttgccttttaaattcttttcccccatccccctccaaagtcttgatagcaagcgttattttgggggtagaaacggtgaaatctctagcctctttgtgtttttgttgttgttgttgttgttgttttatataatgcatgtattcactaaaataaaatttaaaaaactcctgtcttgctagacaaggttgctgttgtgcagtgtgcctgtcactactggtctgtactccttggatttgcatttttgtattttgtacaaagtaaaaataaactgttatgagtagtaaaaaaaaaaaaaaaaaa

SEQ ID NO: 150 - DNA, 1119 bp, Homo sapiens
attccagcctcattgtaacacacattctacgcctagcctggctttcttgctctccctcatctcattgtttcagcggaggccaaatctgaagtcctttccagggagtggctctgttcatcttattcgccagccaaagtaggaacagcgtaagaggagagagacacattcagcagccaaaggactcggtggaaagagcagaacaccatagacaatatgtcgctcttgggacccaaggtgctgctgtttcttgctgcattcatcatcacctctgactggatacccctgggggtcaatagtcaacgaggagacgatgtgactcaagcgactccagaaacattcacagaagatcctaatctggtgaatgatcccgctacagatgaaacagttttggctgttttggctgatattgcaccttccacagatgacttggcctccctcagtgaaaaaaataccactgcagagtgctgggatgagaaatttacctgcacaaggctctactctgtgcatcggccggttaaacaatgcattcatcagttatgcttcaccagtttacgacgtatgtacatcgtcaacaaggagatctgctctcgtcttgtctgtaaggaacacgaagctatgaaagatgagctttgccgtcagatggctggtctgccccctaggagactccgtcgctccaattacttccgacttcctccctgtgaaaatgtggatttgcagagacccaatggtctgtgatcattgaaaaagaggaaagaagaaaaaatgtatgggtgagaggaaggaggatctccttcttctccaaccattgacagctaacccttagacagtatttcttaaaccaatccttttgcaatgtccagcttttacccctactctctactttttcacccaaactgataacatttatctcattttctagcacttaaaatacaaagtctatattattgcataattttgctgcttctcaatatcatagacacagtgaatagatgatgactatatggcttatatacaaacattctatgtacaatttcaagggagactaaactttaggctaataatctttactattgaatctgtctgatatagatcttagggttgaagaagctatctttgtct

SEQ ID NO: 151 - DNA, 10558 bp, Homo sapiens
cagtttggagctcagtcttccaccaaaggccgttcagttctcctgggctccagcctcctgcaaggactgcaagagttttcctccgcagctctgagtctccacttttttggtggagaaaggctgcaaaaagaaaaagagacgcagtgagtgggaaaagtatgcatcctattcaaacctaattgaatcgaggagcccagggacacacgccttcaggtttgctcaggggttcatatttggtgcttagacaaattcaaaatgaggaaacatcggcacttgcccttagtggccgtcttttgcctctttctctcaggctttcctacaactcatgcccagcagcagcaagcagatgtcaaaaatggtgcggctgctgatataatatttctagtggattcctcttggaccattggagaggaacatttccaacttgttcgagagtttctatatgatgttgtaaaatccttagctgtgggagaaaatgatttccattttgctctggtccagttcaacggaaacccacataccgagttcctgttaaatacgtatcgtactaaacaagaagtcctttctcatatttccaacatgtcttatattgggggaaccaatcagactggaaaaggattagaatacataatgcaaagccacctcaccaaggctgctggaagccgggccggtgacggagtccctcaggttatcgtagtgttaactgatggacactcgaaggatggccttgctctgccctcagcggaacttaagtctgctgatgttaacgtgtttgcaattggagttgaggatgcagatgaaggagcgttaaaagaaatagcaagtgaaccgctcaatatgcatatgttcaacctagagaattttacctcacttcatgacatagtaggaaacttagtgtcctgtgtgcattcatccgtgagtccagaaagggctggggacacggaaacccttaaagacatcacagcacaagactctgctgacattattttccttattgatggatcaaacaacaccggaagtgtcaatttcgcagtcattctcgacttccttgtaaatctccttgagaaactcccaattggaactcagcagatccgagtgggggtggtccagtttagcgatgagcccagaaccatgttttccttggacacctactccaccaaggcccaggttctgggtgcagtgaaagccctcgggtttgctggtggggagttggccaatatcggcctcgcccttgatttcgtggtggagaaccacttcacccgggcagggggcagccgcgtggaggaaggggttccccaggtgctggtcctcataagtgccgggccttctagtgacgagattcgctacggggtggtagcactgaagcaggctagcgtgttctcattcggccttggagcccaggccgcctccagggcagagcttcagcacatagctaccgatgacaacttggtgtttactgtcccggaattccgtagctttggggacctccaggagaaattactgccgtacattgttggcgtggcccaaaggcacattgtcttgaaaccgccaaccattgtcacacaagtcattgaagtcaacaagagagacatagtcttcctggtggatggctcatctgcactgggactggccaacttcaatgccatccgagacttcattgctaaagtcatccagaggctggaaatcggacaggatcttatccaggtggcagtggcccagtatgcagacactgtgaggcctgaattttatttcaatacccatccaacaaaaagggaagtcataaccgctgtgcggaaaatgaagcccctggacggctcggccctgtacacgggctctgctctagactttgttcgtaacaacctattcacgagttcagccggctaccgggctgccgaggggattcctaagcttttggtgctgatcacaggtggtaagtccctagatgaaatcagccagcctgcccaggagctgaagagaagcagcataatggcctttgccattgggaacaagggtgccgatcaggctgagctggaagagatcgctttcgactcctccctggtgttcatcccagctgagttccgagccgccccattgcaaggcatgctgcctggcttgctggcacctctcaggaccctctctggaacccctgaagttcactcaaacaaaagagatatcatctttcttttggatggatcagccaacgttggaaaaaccaatttcccttatgtgcgcgactttgtaatgaacctagttaacagccttgatattggaaatgacaatattcgtgttggtttagtgcaatttagtgacactcctgtaacggagttctctttaaacacataccagaccaagtcagatatccttggtcatctgaggcagctgcagctccagggaggttcgggcctgaacacaggctcagccctaagctatgtctatgccaaccacttcacggaagctggcggcagcaggatccgtgaacacgtgccgcagctcctgcttctgctcacagctgggcagtctgaggactcctatttgcaagctgccaacgccttgacacgcgcgggcatcctgactttttgtgtgggagctagccaggcgaataaggcagagcttgagcagattgcttttaacccaagcctggtgtatctcatggatgatttcagctccctgccagctttgcctcagcagctgattcagcccctaaccacatatgttagtggaggtgtggaggaagtaccactcgctcagccagagagcaagcgagacattctgttcctctttgacggctcagccaatcttgtgggccagttccctgttgtccgtgactttctctacaagattatcgatgagctcaatgtgaagccagaggggacccgaattgcggtggctcagtacagcgatgatgtcaaggtggagtcccgttttgatgagcaccagagtaagcctgagatcctgaatcttgtgaagagaatgaagatcaagacgggcaaagccctcaacctgggctacgcgctggactatgcacagaggtacatttttgtgaagtctgctggcagccggatcgaggatggagtgcttcagttcctggtgctgctggtcgcaggaaggtcatctgaccgtgtggatgggccagcaagtaacctgaagcagagtggggttgtgcctttcatcttccaagccaagaacgcagaccctgctgagttagagcagatcgtgctgtctccagcgtttatcctggctgcagagtcgcttcccaagattggagatcttcatccacagatagtgaatctcttaaaatcagtgcacaacggagcaccagcaccagtttcaggtgaaaaggacgtggtgtttctgcttgatggctctgagggcgtcaggagcggcttccctctgttgaaagagtttgtccagagagtggtggaaagcctggatgtgggccaggaccgggtccgcgtggccgtggtgcagtacagcgaccggaccaggcccgagttctacctgaattcatacatgaacaagcaggacgtcgtcaacgctgtccgccagctgaccctgctgggagggccgacccccaacaccggggccgccctggagtttgtcctgaggaacatcctggtcagctctgcgggaagcaggataacagaaggtgtgccccagctgctgatcgtcctcacggccgacaggtctggggatgatgtgcggaacccctccgtggtcgtgaagaggggtggggctgtgcccattggcattggcatcgggaacgctgacatcacagagatgcagaccatctccttcatcccggactttgccgtggccattcccacctttcgccagctggggaccgtccaacaggtcatctctgagagggtgacccagctcacccgcgaggagctgagcaggctgcagccggtgttgcagcctctaccgagcccaggtgttggtggcaagagggacgtggtctttctcatcgatgggtcccaaagtgccgggcctgagttccagtacgttcgcaccctcatagagaggctggttgactacctggacgtgggctttgacaccacccgggtggctgtcatccagttcagcgatgaccccaaggcggagttcctgctgaacgcccattccagcaaggatgaagtgcagaacgcggtgcagcggctgaggcccaagggagggcggcagatcaacgtgggcaatgccctggagtacgtgtccaggaacatcttcaagaggcccctggggagccgcattgaagagggcgtcccacagttcctggtcctcatctcgtctggaaagtctgacgatgaggtggtcgtcccggcggtggagctcaagcagtttggcgtggcccctttcacgatcgccaggaacgcagaccaggaggagctggtgaagatctcgctgagccccgaatatgtgttctcggtgagcaccttccgggagctgcccagcctggagcagaaactgctgacgcccatcacgaccctgacctcagagcagatccagaagctcttagccagcactcgctatccacctccagcagttgagagtgatgctgcagacattgtctttctgatcgacagctctgagggagttaggccagatggctttgcacatattcgagattttgttagcaggattgttcgaagactcaacatcggccccagtaaagtgagagttggggtcgtgcagttcagcaatgatgtcttcccagaattctatctgaaaacctacagatcccaggccccggtgctggacgccatacggcgcctgaggctcagaggggggtccccactgaacactggcaaggctctcgaatttgtggcaagaaacctctttgttaagtctgcggggagtcgcatagaagacggggtgccccaacacctggtcctggtcctgggtggaaaatcccaggacgatgtgtccaggttcgcccaggtgatccgttcctcgggcattgtgagtttaggggtaggagaccggaacatcgacagaacagagctgcagaccatcaccaatgaccccagactggtcttcacagtgcgagagttcagagagcttcccaacatagaagaaagaatcatgaactcgtttggaccctccgcagccactcctgcacctccaggggtggacacccctcctccttcacggccagagaagaagaaagcagacattgtgttcctgttggatggttccatcaacttcaggagggacagtttccaggaagtgcttcgttttgtgtctgaaatagtggacacagtttatgaagatggcgactccatccaagtggggcttgtccagtacaactctgaccccactgacgaattcttcctgaaggacttctctaccaagaggcagattattgacgccatcaacaaagtggtctacaaagggggaagacacgccaacactaaggtgggccttgagcacctgcgggtaaaccactttgtgcctgaggcaggcagccgcctggaccagcgggtccctcagattgcctttgtgatcacgggaggaaagtcggtggaagatgcacaggatgtgagcctggccctcacccagaggggggtcaaagtgtttgctgttggagtgaggaatatcgactcggaggaggttggaaagatagcgtccaacagcgccacagcgttccgcgtgggcaacgtccaggagctgtccgaactgagcgagcaagttttggaaactttgcatgatgcgatgcatgaaaccctttgccctggtgtaactgatgctgccaaagcttgtaatctggatgtgattctggggtttgatggttctagagaccagaatgtttttgtggcccagaagggcttcgagtccaaggtggacgccatcttgaacagaatcagccagatgcacagggtcagctgcagcggtggccgctcgcccaccgtgcgtgtgtcagtggtggccaacacgccctcgggcccggtggaggcctttgactttgacgagtaccagccagagatgctcgagaagttccggaacatgcgcagccagcacccctacgtcctcacggaggacaccctgaaggtctacctgaacaagttcagacagtcctcgccggacagcgtgaaggtggtcattcattttactgatggagcagacggagatctggctgatttacacagagcatctgagaacctccgccaagaaggagtccgtgccttgatcctggtgggccttgaacgagtggtcaacttggagcggctaatgcatctggagtttgggcgagggtttatgtatgacaggcccctgaggcttaacttgctggacttggattatgaactagcggagcagcttgacaacattgccgagaaagcttgctgtggggttccctgcaagtgctctgggcagaggggagaccgcgggcccatcggcagcatcgggccaaagggtattcctggagaagacggctaccgaggctatcctggtgatgagggtggacccggtgagcgtggtccgcctggtgtgaacggcactcaaggtttccagggctgcccgggccagagaggagtaaagggctctcggggattcccaggagagaagggcgaagtaggagaaattggactggatggtctggatggtgaagatggagacaaaggattgcctggttcttctggagagaaagggaatcctggaagaaggggtgataaaggacctcgaggagagaaaggagaaagaggagatgttgggattcgaggggacccgggtaacccaggacaagacagccaggagagaggacccaaaggagaaaccggtgacctcggccccatgggtgtcccagggagagatggagtacctggaggacctggagaaactgggaagaatggtggctttggccgaaggggaccccccggagctaagggcaacaagggcggtcctggccagccgggctttgagggagagcaggggaccagaggtgcacagggcccagctggtcctgctggtcctccagggctgataggagaacaaggcatttctggacctaggggaagcggaggtgcccgtggcgctcctggagaacgaggcagaaccggtccactgggaagaaagggtgagcccggagagccaggaccaaaaggaggaatcgggaacccgggccctcgtggggagacgggagatgacgggagagacggagttggcagtgaaggacgcagaggcaaaaaaggagaaagaggatttcctggatacccaggaccaaagggtaacccaggtgaacctgggctaaatggaacaacaggacccaaaggcatcagaggccgaaggggaaattcgggacctccagggatagttggacagaaggggagacctggctacccaggaccagctggtccaaggggcaacaggggcgactccatcgatcaatgtgccctcatccaaagcatcaaagataaatgcccttgctgttacgggcccctggagtgccccgtcttcccaacagaactagcctttgctttagacacctctgagggagtcaaccaagacactttcggccggatgcgagatgtggtcttgagtattgtgaatgtcctgaccattgctgagagcaactgcccgacgggggcccgggtggctgtggtcacctacaacaacgaggtgaccacggagatccggtttgctgactccaagaggaagtcggtcctcctggacaagattaagaaccttcaggtggctctgacatccaaacagcagagtctggagactgccatgtcgtttgtggccaggaacacatttaagcgtgtgaggaacggattcctaatgaggaaagtggctgttttcttcagcaacacacccacaagagcatccccacagctcagagaggctgtgctcaaactctcagatgcggggatcacccccttgttccttacaaggcaggaagaccggcagctcatcaacgctttgcagatcaataacacagcagtggggcatgcgcttgtcctgcctgcagggagagacctcacagacttcctggagaatgtcctcacgtgtcatgtttgcttggacatctgcaacatcgacccatcctgtggatttggcagttggaggccttccttcagggacaggagagcggcagggagtgatgtggacatcgacatggctttcatcttagacagcgctgagaccaccaccctgttccagttcaatgagatgaagaagtacatagcgtacctggtcagacaactggacatgagcccagatcccaaggcctcccagcacttcgccagagtggcagttgtgcagcacgcgccctctgagtccgtggacaatgccagcatgccacctgtgaaggtggaattctccctgactgactatggctccaaggagaagctggtggacttcctcagcaggggaatgacacagttgcagggaaccagggccttaggcagtgccattgaatacaccatagagaatgtctttgaaagtgccccaaacccacgggacctgaaaattgtggtcctgatgctgacgggcgaggtgccggagcagcagctggaggaggcccagagagtcatcctgcaggccaaatgcaagggctacttcttcgtggtcctgggcattggcaggaaggtgaacatcaaggaggtatacaccttcgccagtgagccaaacgacgtcttcttcaaattagtggacaagtccaccgagctcaacgaggagcctttgatgcgcttcgggaggctgttgccgtccttcgtcagcagtgaaaatgctttttacttgtccccagatatcaggaaacagtgtgattggttccaaggggaccaacccacaaagaaccttgtgaagtttggtcacaaacaagtaaatgttccgaataacgttacttcaagtcctacatccaacccagtgacgacaacgaagccggtgactacgacgaagccggtgaccaccacaacaaagcctgtaaccaccacaacaaagcctgtgactattataaatcagccatctgtgaagccagccgctgcaaagccggcccctgcgaaacctgtggctgccaagcctgtggccacaaagacggccactgttagacccccagtggcggtgaagccagcaacagcagcgaagcctgtagcagcaaagccagcagctgtaagaccccccgctgctgctgcaaaaccagtggcgaccaagcctgaggtccctaggccacaggcagccaaaccagctgccaccaagccagccaccactaagcccgtggttaagatgctccgtgaagtccaggtgtttgagataacagagaacagcgccaaactccactgggagaggcctgagccccccggtccttatttttatgacctcaccgtcacctcagcccatgatcagtccctggttctgaagcagaacctcacggtcacggaccgcgtcattggaggcctgctcgctgggcagacataccatgtggctgtggtctgctacctgaggtctcaggtcagagccacctaccacggaagtttcagtacaaagaaatctcagcccccacctccacagccagcaaggtcagcttctagttcaaccatcaatctaatggtgagcacagaaccattggctctcactgaaacagatatatgcaagttgccgaaagacgaaggaacttgcagggatttcatattaaaatggtactatgatccaaacaccaaaagctgtgcaagattctggtatggaggttgtggtggaaacgaaaacaaatttggatcacagaaagaatgtgaaaaggtttgcgctcctgtgctcgccaaacccggagtcatcagtgtgatgggaacctaagcgtgggtggccaacatcatatacctcttgaagaagaaggagtcagccatcgccaacttgtctctgtagaagctccgggtgtagattcccttgcactgtatcatttcatgctttgatttacactcgaactcgggagggaacatcctgctgcatgacctatcagtatggtgctaatgtgtctgtggaccctcgctctctgtctccagcagttctctcgaatactttgaatgttgtgtaacagttagccactgctggtgtttatgtgaacattcctatcaatccaaattccctctggagtttcatgttatgcctgttgcaggcaaatgtaaagtctagaaaataatgcaaatgtcacggctactctatatacttttgcttggttcattttttttcccttttagttaagcatgactttagatgggaagcctgtgtatcgtggagaaacaagagaccaactttttcattccctgcccccaatttcccagactagatttcaagctaattttctttttctgaagcctctaacaaatgatctagttcagaaggaagcaaaatcccttaatctatgtgcaccgttgggaccaatgccttaattaaagaatttaaaaaagttgtaatagagaatatttttggcattcctctcaatgttgtgtgttttttttttttgtgtgctggagggaggggatttaattttaattttaaaatgtttaggaaatttatacaaagaaactttttaataaagtatattgaaagtttaaaaaaaaaaaaaaaa

SEQ ID NO: 152 - DNA, 1082 bp, Homo sapiens
gatcccagacctcggcttgcagtagtgttagactgaagataaagtaagtgctgtttgggctaacaggatctcctcttgcagtctgcagcccaggacgctgattccagcagcgccttaccgcgcagcccgaagattcactatggtgaaaatcgccttcaatacccctaccgccgtgcaaaaggaggaggcgcggcaagacgtggaggccctcctgagccgcacggtcagaactcagatactgaccggcaaggagctccgagttgccacccaggaaaaagagggctcctctgggagatgtatgcttactctcttaggcctttcattcatcttggcaggacttattgttggtggagcctgcatttacaagtacttcatgcccaagagcaccatttaccgtggagagatgtgcttttttgattctgaggatcctgcaaattcccttcgtggaggagagcctaacttcctgcctgtgactgaggaggctgacattcgtgaggatgacaacattgcaatcattgatgtgcctgtccccagtttctctgatagtgaccctgcagcaattattcatgactttgaaaagggaatgactgcttacctggacttgttgctggggaactgctatctgatgcccctcaatacttctattgttatgcctccaaaaaatctggtagagctctttggcaaactggcgagtggcagatatctgcctcaaacttatgtggttcgagaagacctagttgctgtggaggaaattcgtgatgttagtaaccttggcatctttatttaccaactttgcaataacagaaagtccttccgccttcgtcgcagagacctcttgctgggtttcaacaaacgtgccattgataaatgctggaagattagacacttccccaacgaatttattgttgagaccaagatctgtcaagagtaagaggcaacagatagagtgtccttggtaataagaagtcagagatttacaatatgactttaacattaaggtttatgggatactcaagatatttactcatgcatttactctattgcttatgccgtaaaaaaaaaaaaaaaaaaaaaaaaaaaaa

SEQ ID NO: 153 - DNA, 1311 bp, Homo sapiens
ctctaccggcgggatttgatggcgtgatgtctcacagaaagttctccgctcccagacatgggtccctcggcttcctgcctcggaagcgcagcagcaggcatcgtgggaaggtgaagagcttccctaaggatgacccgtccaagccggtccacctcacagccttcctgggatacaaggctggcatgactcacatcgtgcgggaagtcgacaggccgggatccaaggtgaacaagaaggaggtggtggaggctgtgaccattgtagagacaccacccatggtggttgtgggcattgtgggctacgtggaaacccctcgaggcctccggaccttcaagactgtctttgctgagcacatcagtgatgaatgcaagaggcgtttctataagaattggcataaatctaagaagaaggcctttaccaagtactgcaagaaatggcaggatgaggatggcaagaagcagctggagaaggacttcagcagcatgaagaagtactgccaagtcatccgtgtcattgcccacacccagatgcgcctgcttcctctgcgccagaagaaggcccacctgatggagatccaggtgaacggaggcactgtggccgagaagctggactgggcccgcgagaggcttgagcagcaggtacctgtgaaccaagtgtttgggcaggatgagatgatcgacgtcatcggggtgaccaagggcaaaggctacaaaggggtcaccagtcgttggcacaccaagaagctgccccgcaagacccaccgaggcctgcgcaaggtggcctgtattggggcatggcatcctgctcgtgtagccttctctgtggcacgcgctgggcagaaaggctaccatcaccgcactgagatcaacaagaagatttataagattggccagggctaccttatcaaggacggcaagctgatcaagaacaatgcctccactgactatgacctatctgacaagagcatcaaccctctgggtggctttgtccactatggtgaagtgaccaatgactttgtcatgctgaaaggctgtgtggtgggaaccaagaagcgggtgctcaccctccgcaagtccttgctggtgcagacgaagcggcgggctctggagaagattgaccttaagttcattgacaccacctccaagtttggccatggccgcttccagaccatggaggagaagaaagcattcatgggaccactgaagaaagaccgaattgcaaaggaagaaggagcttaatgccaggaacagattttgcagttggtggggtctcaataaaagttattttccactgaaaaaaaaaaaaaaaaaa

SEQ ID NO: 154 - DNA, 1524 bp, Homo sapiens
gcagagcacagcatcgtcgggaccagactcgtctcaggccagttgcagccttctcagccaaacgccgaccaaggaaaactcactaccatgagaattgcagtgatttgcttttgcctcctaggcatcacctgtgccataccagttaaacaggctgattctggaagttctgaggaaaagcagctttacaacaaatacccagatgctgtggccacatggctaaaccctgacccatctcagaagcagaatctcctagccccacagacccttccaagtaagtccaacgaaagccatgaccacatggatgatatggatgatgaagatgatgatgaccatgtggacagccaggactccattgactcgaacgactctgatgatgtagatgacactgatgattctcaccagtctgatgagtctcaccattctgatgaatctgatgaactggtcactgattttcccacggacctgccagcaaccgaagttttcactccagttgtccccacagtagacacatatgatggccgaggtgatagtgtggtttatggactgaggtcaaaatctaagaagtttcgcagacctgacatccagtaccctgatgctacagacgaggacatcacctcacacatggaaagcgaggagttgaatggtgcatacaaggccatccccgttgcccaggacctgaacgcgccttctgattgggacagccgtgggaaggacagttatgaaacgagtcagctggatgaccagagtgctgaaacccacagccacaagcagtccagattatataagcggaaagccaatgatgagagcaatgagcattccgatgtgattgatagtcaggaactttccaaagtcagccgtgaattccacagccatgaatttcacagccatgaagatatgctggttgtagaccccaaaagtaaggaagaagataaacacctgaaatttcgtatttctcatgaattagatagtgcatcttctgaggtcaattaaaaggagaaaaaatacaatttctcactttgcatttagtcaaaagaaaaaatgctttatagcaaaatgaaagagaacatgaaatgcttctttctcagtttattggttgaatgtgtatctatttgagtctggaaataactaatgtgtttgataattagtttagtttgtggcttcatggaaactccctgtaaactaaaagcttcagggttatgtctatgttcattctatagaagaaatgcaaactatcactgtattttaatatttgttattctctcatgaatagaaatttatgtagaagcaaacaaaatacttttacccacttaaaaagagaatataacattttatgtcactataatcttttgttttttaagttagtgtatattttgttgtgattatctttttgtggtgtgaataaatcttttatcttgaatgtaataagaatttggtggtgtcaattgcttatttgttttcccacggttgtccagcaattaataaaacataaccttttttactgcctaaaaaaaaaaaaaaaaaaaa

SEQ ID NO: 155 - DNA, 1987 bp, Homo sapiens
gcagacttagccgtgcattgcaggcatggaggattaatcagtgacaggaagctgcgtctctcggagcggtgaccagctgtggtcaggagagcctcagcagggccagccccaggagtctttcccgattcttgctcactgctcacccacctgctgctgccatgaggcaccttggggccttcctcttccttctgggggtcctgggggccctcactgagatgtgtgaaataccagagatggacagccatctggtagagaagttgggccagcacctcttaccttggatggaccggctttccctggagcacttgaaccccagcatctatgtgggcctacgcctctccagtctgcaggctgggaccaaggaagacctctacctgcacagcctcaagcttggttaccagcagtgcctcctagggtctgccttcagcgaggatgacggtgactgccagggcaagccttccatgggccagctggccctctacctgctcgctctcagagccaactgtgagtttgtcaggggccacaagggggacaggctggtctcacagctcaaatggttcctggaggatgagaagagagccattgggcatgatcacaagggccacccccacactagctactaccagtatggcctgggcattctggccctgtgtctccaccagaagcgggtccatgacagcgtggtggacaaacttctgtatgctgtggaacctttccaccagggccaccattctgtggacacagcagccatggcaggcttggcattcacctgtctgaagcgctcaaacttcaaccctggtcggagacaacggatcaccatggccatcagaacagtgcgagaggagatcttgaaggcccagacccccgagggccactttgggaatgtctacagcaccccattggcattacagttcctcatgacttcccccatgcgtggggcagaactgggaacagcatgtctcaaggcgagggttgctttgctggccagtctgcaggatggagccttccagaatgctctcatgatttcccagctgctgcccgttctgaaccacaagacctacattgatctgatcttcccagactgtctggcaccacgagtcatgttggaaccagctgctgagaccattcctcagacccaagagatcatcagtgtcacgctgcaggtgcttagtctcttgccgccgtacagacagtccatctctgttctggccgggtccaccgtggaagatgtcctgaagaaggcccatgagttaggaggattcacatatgaaacacaggcctccttgtcaggcccctacttaacctccgtgatggggaaagcggccggagaaagggagttctggcagcttctccgagaccccaacaccccactgttgcaaggtattgctgactacagacccaaggatggagaaaccattgagctgaggctggttagctggtagcccctgagctccctcatcccagcagcctcgcacactccctaggcttctaccctccctcctgatgtccctggaacaggaactcgcctgaccctgctgccacctcctgtgcactttgagcaatgccccctgggatcaccccagccacaagcccttcgagggccctataccatggcccaccttggagcagagagccaagcatcttccctgggaagtctttctggccaagtctggccagcctggccctgcaggtctcccatgaaggccaccccatggtctgatgggcatgaagcatctcagactccttggcaaaaaacggagtccgcaggccgcaggtgttgtgaagaccactcgttctgtggttggggtcctgcaagaaggcctcctcagcccgggggctatggccctgaccccagctctccactctgctgttagagtggcagctccgagctggttgtggcacagtagctggggagacctcagcagggctgctcagtgcctgcctctgacaaaattaaagcattgatggcctgtggacctgcaaaaaa

SEQ ID NO: 156 - DNA, 4049 bp, Homo sapiens
cctcttgcggccacaggcgcggcgtcctcggcggcgggcggcagctagcgggagccgggacgccggtgcagccgcagcgcgcggaggaacccgggtgtgccgggagctgggcggccacgtccggacgggaccgagacccctcgtagcgcattgcggcgacctcgccttccccggccgcgagcgcgccgctgcttgaaaagccgcggaacccaaggacttttctccggtccgagctcggggcgccccgcaggcgcacggtacccgtgctgcagtcgggcacgccgcggcgccgggggcctccgcagggcgatggagccggtctgcaaggaaagtgaggcgccgccgctgcgttctggaggaggggggcacaaggtctggagaccccgggtggcggacgggagccctccccccgccccgcctccggggcaccagctccggctccattgttcccgcccgggctggaggcgccgagcaccgagcgccgccgggagtcgagcgccggccgcggagctcttgcgaccccgccaggacccgaacagagcccgggggcggcgggccggagccggggacgcgggcacacgcccgctcgcacaagccacggcggactctcccgaggcggaacctccacgccgagcgagggtcagtttgaaaaggaggatcgagctcactgtggagtatccatggagatgtggagccttgtcaccaacctctaactgcagaactgggatgtggagctggaagtgcctcctcttctgggctgtgctggtcacagccacactctgcaccgctaggccgtccccgaccttgcctgaacaagcccagccctggggagcccctgtggaagtggagtccttcctggtccaccccggtgacctgctgcagcttcgctgtcggctgcgggacgatgtgcagagcatcaactggctgcgggacggggtgcagctggcggaaagcaaccgcacccgcatcacaggggaggaggtggaggtgcaggactccgtgcccgcagactccggcctctatgcttgcgtaaccagcagcccctcgggcagtgacaccacctacttctccgtcaatgtttcagatgctctcccctcctcggaggatgatgatgatgatgatgactcctcttcagaggagaaagaaacagataacaccaaaccaaaccgtatgcccgtagctccatattggacatccccagaaaagatggaaaagaaattgcatgcagtgccggctgccaagacagtgaagttcaaatgcccttccagtgggaccccaaaccccacactgcgctggttgaaaaatggcaaagaattcaaacctgaccacagaattggaggctacaaggtccgttatgccacctggagcatcataatggactctgtggtgccctctgacaagggcaactacacctgcattgtggagaatgagtacggcagcatcaaccacacataccagctggatgtcgtggagcggtcccctcaccggcccatcctgcaagcagggttgcccgccaacaaaacagtggccctgggtagcaacgtggagttcatgtgtaaggtgtacagtgacccgcagccgcacatccagtggctaaagcacatcgaggtgaatgggagcaagattggcccagacaacctgccttatgtccagatcttgaagactgctggagttaataccaccgacaaagagatggaggtgcttcacttaagaaatgtctcctttgaggacgcaggggagtatacgtgcttggcgggtaactctatcggactctcccatcactctgcatggttgaccgttctggaagccctggaagagaggccggcagtgatgacctcgcccctgtacctggagatcatcatctattgcacaggggccttcctcatctcctgcatggtggggtcggtcatcgtctacaagatgaagagtggtaccaagaagagtgacttccacagccagatggctgtgcacaagctggccaagagcatccctctgcgcagacaggtaacagtgtctgctgactccagtgcatccatgaactctggggttcttctggttcggccatcacggctctcctccagtgggactcccatgctagcaggggtctctgagtatgagcttcccgaagaccctcgctgggagctgcctcgggacagactggtcttaggcaaacccctgggagagggctgctttgggcaggtggtgttggcagaggctatcgggctggacaaggacaaacccaaccgtgtgaccaaagtggctgtgaagatgttgaagtcggacgcaacagagaaagacttgtcagacctgatctcagaaatggagatgatgaagatgatcgggaagcataagaatatcatcaacctgctgggggcctgcacgcaggatggtcccttgtatgtcatcgtggagtatgcctccaagggcaacctgcgggagtacctgcaggcccggaggcccccagggctggaatactgctacaaccccagccacaacccagaggagcagctctcctccaaggacctggtgtcctgcgcctaccaggtggcccgaggcatggagtatctggcctccaagaagtgcatacaccgagacctggcagccaggaatgtcctggtgacagaggacaatgtgatgaagatagcagactttggcctcgcacgggacattcaccacatcgactactataaaaagacaaccaacggccgactgcctgtgaagtggatggcacccgaggcattatttgaccggatctacacccaccagagtgatgtgtggtctttcggggtgctcctgtgggagatcttcactctgggcggctccccataccccggtgtgcctgtggaggaacttttcaagctgctgaaggagggtcaccgcatggacaagcccagtaactgcaccaacgagctgtacatgatgatgcgggactgctggcatgcagtgccctcacagagacccaccttcaagcagctggtggaagacctggaccgcatcgtggccttgacctccaaccaggagtacctggacctgtccatgcccctggaccagtactcccccagctttcccgacacccggagctctacgtgctcctcaggggaggattccgtcttctctcatgagccgctgcccgaggagccctgcctgccccgacacccagcccagcttgccaatggcggactcaaacgccgctgactgccacccacacgccctccccagactccaccgtcagctgtaaccctcacccacagcccctgctgggcccaccacctgtccgtccctgtcccctttcctgctggcaggagccggctgcctaccaggggccttcctgtgtggcctgccttcaccccactcagctcacctctccctccacctcctctccacctgctggtgagaggtgcaaagaggcagatctttgctgccagccacttcatcccctcccagatgttggaccaacacccctccctgccaccaggcactgcctggagggcagggagtgggagccaatgaacaggcatgcaagtgagagcttcctgagctttctcctgtcggtttggtctgttttgccttcacccataagcccctcgcactctggtggcaggtgccttgtcctcagggctacagcagtagggaggtcagtgcttcgtgcctcgattgaaggtgacctctgccccagataggtggtgccagtggcttattaattccgatactagtttgctttgctgaccaaatgcctggtaccagaggatggtgaggcgaaggccaggttgggggcagtgttgtggccctggggcccagccccaaactgggggctctgtatatagctatgaagaaaacacaaagtgtataaatctgagtatatatttacatgtctttttaaaagggtcgttaccagagatttacccatcgggtaagatgctcctggtggctgggaggcatcagttgctatatattaaaaacaaaaaagaaaaaaaaggaaaatgtttttaaaaaggtcatatattttttgctacttttgctgttttatttttttaaattatgttctaaac

SEQ ID NO: 157 - DNA, 4774 bp, Homo sapiens
acgcgcctgaagcacaaagcagatagctaggaatgaaccatccctgggagtatgtggaaacaacggaggagctctgacttcccaactgtcccattctatgggcgaaggaactgctcctgacttcagtggttaagggcagaattgaaaataattctggaggaagataagaatgattcctgcgcgactgcaccgggactacaaagggcttgtcctgctgggaatcctcctggggactctgtgggagaccggatgcacccagatacgctattcagttccggaagagctggagaaaggctctagggtgggcgacatctccagggacctggggctggagccccgggagctcgcggagcgcggagtccgcatcatccccagaggtaggacgcagcttttcgccctgaatccgcgcagcggcagcttggtcacggcgggcaggatagaccgggaggagctctgtatgggggccatcaagtgtcaattaaatctagacattctgatggaggataaagtgaaaatatatggagtagaagtagaagtaagggacattaacgacaatgcgccttactttcgtgaaagtgaattagaaataaaaattagtgaaaatgcagccactgagatgcggttccctctaccccacgcctgggatccggatatcgggaagaactctctgcagagctacgagctcagcccgaacactcacttctccctcatcgtgcaaaatggagccgacggtagtaagtaccccgaattggtgctgaaacgcgccctggaccgcgaagaaaaggctgctcaccacctggtccttacggcctccgacgggggcgacccggtgcgcacaggcaccgcgcgcatccgcgtgatggttctggatgcgaacgacaacgcaccagcgtttgctcagcccgagtaccgcgcgagcgttccggagaatctggccttgggcacgcagctgcttgtagtcaacgctaccgaccctgacgaaggagtcaatgcggaagtgaggtattccttccggtatgtggacgacaaggcggcccaagttttcaaactagattgtaattcagggacaatatcaacaataggggagttggaccacgaggagtcaggattctaccagatggaagtgcaagcaatggataatgcaggatattctgcgcgagccaaagtcctgatcactgttctggacgtgaacgacaatgccccagaagtggtcctcacctctctcgccagctcggttcccgaaaactctcccagagggacattaattgcccttttaaatgtaaatgaccaagattctgaggaaaacggacaggtgatctgtttcatccaaggaaatctgccctttaaattagaaaaatcttacggaaattactatagtttagtcacagacatagtcttggatagggaacaggttcctagctacaacatcacagtgaccgccactgaccggggaaccccgcccctatccacggaaactcatatctcgctgaacgtggcagacaccaacgacaacccgccggtcttccctcaggcctcctattccgcttatatcccagagaacaatcccagaggagtttccctcgtctctgtgaccgcccacgaccccgactgtgaagagaacgcccagatcacttattccctggctgagaacaccatccaaggggcaagcctatcgtcctacgtgtccatcaactccgacactggggtactgtatgcgctgagctccttcgactacgagcagttccgagacttgcaagtgaaagtgatggcgcgggacaacgggcacccgcccctcagcagcaacgtgtcgttgagcctgttcgtgctggaccagaacgacaatgcgcccgagatcctgtaccccgccctccccacggacggttccactggcgtggagctggctccccgctccgcagagcccggctacctggtgaccaaggtggtggcggtggacagagactccggccagaacgcctggctgtcctaccgtctgctcaaggccagcgagccgggactcttctcggtgggtctgcacacgggcgaggtgcgcacggcgcgagccctgctggacagagacgcgctcaagcagagcctcgtagtggccgtccaggaccacggccagccccctctctccgccactgtcacgctcaccgtggccgtggccgacagcatcccccaagtcctggcggacctcggcagcctcgagtctccagctaactctgaaacctcagacctcactctgtacctggtggtagcggtggccgcggtctcctgcgtcttcctggccttcgtcatcttgctgctggcgctcaggctgcggcgctggcacaagtcacgcctgctgcaggcttcaggaggcggcttgacaggagcgccggcgtcgcactttgtgggcgtggacggggtgcaggctttcctgcagacctattcccacgaggtttccctcaccacggactcgcggaagagtcacctgatcttcccccagcccaactatgcagacatgctcgtcagccaggagagctttgaaaaaagcgagccccttttgctgtcaggtgattcggtattttctaaagacagtcatgggttaattgagcaagccccgcccaacacggactggcgtttctctcaggcccagagacccggcaccagcggctcccaaaatggcgatgacaccggcacctggcccaacaaccagtttgacacagagatgctgcaagccatgatcttggcgtccgccagtgaagctgctgatgggagctccaccctgggagggggtgccggcaccatgggattgagcgcccgctacggaccccagttcaccctgcagcacgtgcccgactaccgccagaatgtctacatcccaggcagcaatgccacactgaccaacgcagctggcaagcgggatggcaaggccccagcaggtggcaatggcaacaagaagaagtcgggcaagaaggagaagaagtaacatggaggccaggccaagagccacagggcggcctctccccaaccagcccagcttctccttacctgcacccaggcctcagagtttcagggctaacccccagaatactggtaggggccaaggccatgctccccttgggaaacagaaacaagtgcccagtcagcacctaccccttcccccccagggggttgaatatgcaaaagcagttccgctgggaacccccatccaatcaactgctgtacccatgggggtagtggggttactgtagacaccaagaaccatttgccacaccccgtttagttacagctgaactcctccatcttccaaatcaatcaggcccatccatcccatgcctccctcctccccaccccactccaacagttcctctttcccgagtaaggtggttggggtgttgaagtaccaagtaacctacaagcctcctagttctgaaaagttggaagggcatcatgacctcttggcctctcctttgattctcaatcttcccccaaagcatggtttggtgccagccccttcacctccttccagagcccaagatcaatgctcaagttttggaggacatgatcaccatccccatggtactgatgcttgctggatttagggagggcattttgctaccaagcctcttcccaacgccctggggaccagtcttctgttttgtttttcattgtttgacgtttccactgcatgccttgacttcccccacctcctcctcaaacaagagactccactgcatgttccaagacagtatggggtggtaagataaggaagggaagtgtgtggatgtggatggtgggggcatggacaaagcttgacacatcaagttatcaaggccttggaggaggctctgtatgtcctcaggggactgacaacatcctccagattccagccataaaccaataactaggctggacccttcccactacataatagggctcagcccaggcagccagctttgggctgagctaacaggaccaatggattaaactggcatttcagtccaaggaagctcgaagcaggtttaggaccaggtccccttgagaggtcagaggggcctctgtgggtgctgggtactccagaggtgccactggtggaagggtcagcggagccccagcaggaagggtgggccagccaggccattcttagtccctgggttggggaggcagggagctagggcagggaccaaatgaacagaaagtctcagcccaggatggggcttcttcaacagggcccctgccctcctgaagcctcagtccttcaccttgccaggtgccgtttctcttccgtgaaggccactgcccaggtccccagtgcgccccctagtggccatagcctggttaaagttccccagtgcctccttgtgcatagaccttcttctcccacccccttctgcccctgggtccccggccatccagcggggctgccagagaaccccagacctgcccttacagtagtgtagcgccccctccctctttcggctggtgtagaatagccagtagtgtagtgcggtgtgcttttacgtgatggcgggtgggcagcgggcggcgggctccgcgcagccgtctgtccttgatctgcccgcggcggcccgtgttgtgttttgtgctgtgtccacgcgctaaggcgaccccctcccccgtactgacttctcctataagcgcttctcttcgcatagtcacgtagctcccaccccaccctcttcctgtgtctcacgcaagttttatactctaatatttatatggctttttttcttcgacaaaaaaataataaaacgtttcttctgaaaagctg

SEQ ID NO: 158 - DNA, 968 bp, Homo sapiens
gggccccccctcgtgccgtcagaatccccaaaataagtaggaatgggcagcgtctgctcacagtcagtacacctttcccatttgctaatacggcctggccaggctgagaggaatccttccctgccttaccctggacagtgaagccactgagaccatcggtaggcaccatgcggctgcttcaagcgactgttcttttcttccttttgtccaacagtctctgccacagtgaggacggcaaagatgttcagaatgactctattccaacaccggcagaaacttccacaacaaaagcctctgtcacaataccaggcatcgtgtcagtgacaaatcctaacaaaccagcagatggaacacctcccgaaggaacgaccaaaagtgacgtatcccaaacatctttggtgacaacaattaattcactgacaacaccaaaacatgaagtgggaacaacaactgaaggtcccctaaggaatgaaagttccactatgaaaataacagtgccaaatactccaacttcaaatgctaattcaacgctaccaggttcccagaacaagactgagaatcagagttcaatcagaacaacggaaatatcagttactactcaactactggatgccttgccgaaaatcactgcaacatcctctgcatctctaacaactgcacacaccatgtcactgcttcaagatactgaggataggaagattgcaaccactccatcaaccaccccctcctattccagtatcattttgcctgtggttatcgcgctggttgttataacactcttggtatttactctggtgggtttgtatcgaatatgctggaagagagacccaggcactccagaaaacggaaatgatcagcctcagtccgataaagagagtgtgaagctgctcactgttaagacaatctctcatgagtctggcgaacactctgcacaggggaaaaccaagaactgacatcgtgatggatcc

SEQ ID NO: 159 - DNA, 4049 bp, Homo sapiens; identical to SEQ ID NO: 156

SEQ ID NO: 160 - DNA, 482 bp, Homo sapiens
ttccttttcctccctgtcgccaccgaggtcgcacgcgtgagacttctccgccgcctccgccgcagacgccgccgcgatgcgctacgtcgcctcctacctgctggctgccctagggggcaactcctcccccagcgccaaggacatcaagaagatcttggacagcgtgggtatcgaggcggacgacgaccggctcaacaaggttatcagtgagctgaatggaaaaaacattgaagacgtcattgcccagggtattggcaagcttgccagtgtacctgctggtggggctgtagccgtctctgctgccccaggctctgcagcccctgctgctggttctgcccctgctgcagcagaggagaagaaagatgagaagaaggaggagtctgaagagtcagatgatgacatgggatttggcctttttgattaaattcctgctcccctgcaaataaagcctttttacacatctcaaaaaaaaaaaaaaaaaa

SEQ ID NO: 161 - DNA, 615 bp, Homo sapiens
gaattccggccatgaagacccaaaggaatggccactccctggggcggtggtcactggtgctcctgctgctgggcctggtgatgcctctggccatcattgcccaggtcctcagctacaaggaagctgtccttcgtgctatagatggcatcaaccagcggtcctcggatgctaacctctaccgcctcctggacctggaccccaggcccacgatggatggggacccagacacgccaaagcctgtgagcttcacagtgaaggagacagtgtgccccaggacgacacagcagtcaccagaggattgtgacttcaagaaggacgggctggtgaagcggtgtatggggacagtgaccctcaaccaggccaggggctcctttgacatcagttgtgataaggataacaagagatttgccctgctgggtgatttcttccggaaatctaaagagaagattggcaaagagtttaaaagaattgtccagagaatcaaggattttttgcggaatcttgtacccaggacagagtcctagtgtgtgccctaccctggctcaggcttctgggctctgagaaataaactatgagagcaatttcaaaaaaaaaaaaaaaaaaaaaccggaattc

SEQ ID NO: 162 - protein, 366 aa, Homo sapiens; identical to SEQ ID NO: 101

SEQ ID NO: 163 - DNA, 2589 bp, Homo sapiens; identical to SEQ ID NO: 60

SEQ ID NO: 164 - DNA, 1229 bp, Homo sapiens; identical to SEQ ID NO: 61

SEQ ID NO: 165 - DNA, 2477 bp, Homo sapiens; identical to SEQ ID NO: 62

SEQ ID NO: 166 - DNA, 2183 bp, Homo sapiens
ggcagccgaggagaccccgcgcagtgctgccaacgccccggtggagaagctgaggtcatcatcagatttgaaatatttaaagtggatacaaaattatttcagcaatgcagacaattaagtgtgttgttgtgggcgatggtgctgttggtaaaacatgtctcctgatatcctacacaacaaacaaatttccatcggaatatgtaccgactgtttttgacaactatgcagtcacagttatgattggtggagaaccatatactcttggactttttgatactgcagggcaagaggattatgacagattacgaccgctgagttatccacaaacagatgtatttctagtctgtttttcagtggtctctccatcttcatttgaaaacgtgaaagaaaagtgggtgcctgagataactcaccactgtccaaagactcctttcttgcttgttgggactcaaattgatctcagagatgacccctctactattgagaaacttgccaagaacaaacagaagcctatcactccagagactgctgaaaagctggcccgtgacctgaaggctgtcaagtatgtggagtgttctgcacttacacagaaaggcctaaagaatgtatttgacgaagcaatattggctgccctggagcctccagaaccgaagaagagccgcaggtgtgtgctgctatgaacatctctccagagccctttctgcacagctggtgtcggcatcatactaaaagcaatgtttaaatcaaactaaagattaaaaattaaaattcgtttttgcaataatgacaaatgccctgcacctacccacatgcactcgtgtgagacaaggcccataggtatggccccccccttccccctcccagtactagttaattttgagtaattgtattgtcagaaaagtgattagtactatttttttttgttgtttcaaaaaaaaaatttttgtgtgtctgtttttttttttttttttttttgttgtttaaaaggaaggcatgcttgtggatgactctgtaacagactaattggaattgttgaagctgctccctggttccactctggagagtaatctgggacatcttagtgttttgttttgtttttttccctcctcttttttttgggggggagtgtgtgtggggtttgttttttagtcttgtttttttaattcattaaccagtggttagcccttaaggggaggaggacggattgattccacattccacttcctagatctagtttagaaaacatgttccccatctggtgctcttaggaaggagtatagtaaatgcctcatttaataacatactcctttttgaaagttgccttttctctccacccttgagtagatccagtatttgatgaaactcatgaaagtgggtggagcccatcttgcccctcctcttttctaggacgcactatatgtgactgtgactttcaaggacatttgtttgccatttgctgatttttttgggaagttaatttctaacttctttcactgataaatgaagaaaagtattgcacctttgaaatgcaccaaatgaattgagtttgtaattaaaaaaatttttttccctttcagtcattgtcttatatgcttagcatagatttgcagctcagtagtatatggtgttcctagaatgcagctgaagacctgttatgtagaggaaatacgaggggtggtgctagaagacagacatctgtggaatgattcacatcctctcaagttaggaggatggaggcctgcttcattaagaagctgggggtagggtgggggtggggagaacacttaacaacatggggaccagtcaggggaatccccttatttctgttttgcatatgaggaaccctagagcagccaggtgaggctctctagtttaataaaaatcatggaaagactcttaatgcagactcttcttaagtgttaatagggattttttcagcttattttggttgcagtttccaatttttaaaaatgttgaggtaatctttcccaccttcccaaacctaattcttgtagatgcattagtgttgaaccaatgctttctcatgtctcaattctttgtatatgcattcttttcagatgtattaaacaaacaaaaacccttcaaaaaaaaaaaaaaaaaaaaaaaaaaaaaaaaaaaaaaaaaaaaaaaaaaaaaaaaaaaaaaaaaaaaaaaaaaaaaaa

SEQ ID NO: 167 - DNA, 2930 bp, Homo sapiens
gaattccggtttcttcctaaaaaatgtctgatggccgctttctcggtcggcaccgccatgaatgccagcagttactctgcagagatgacggagcccaagtcggtgtgtgtctcggtggatgaggtggtgtccagcaacatggaggccactgagacggacctgctgaatggacatctgaaaaaagtagataataacctcacggaagcccagcgcttctcctccttgcctcggagggcagctgtgaacattgaattcagggacctttcctattcggttcctgaaggaccctggtggaggaagaaaggatacaagaccctcctgaaaggaatttccgggaagttcaatagtggtgagttggtggccattatgggtccttccggggccgggaagtccacgctgatgaacatcctggctggatacagggagacgggcatgaagggggccgtcctcatcaacggcctgccccgggacctgcgctgcttccggaaggtgtcctgctacatcatgcaggatgacatgctgctgccgcatctcactgtgcaggaggccatgatggtgtcggcacatctgaagcttcaggagaaggatgaaggcagaagggaaatggtcaaggagatactgacagcgctgggcttgctgtcttgcgccaacacgcggaccgggagcctgtcaggtggtcagcgcaagcgcctggccatcgcgctggagctggtgaacaaccctccagtcatgttcttcgatgagcccaccagcggcctggacagcgcctcctgcttccaggtggtctcgctgatgaaagggctcgctcaagggggtcgctccatcatttgcaccatccaccagcccagcgccaaactcttcgagctgttcgaccagctttacgtcctgagtcaaggacaatgtgtgtaccggggaaaagtctgcaatcttgtgccatatttgagggatttgggtctgaactgcccaacctaccacaacccagcagattttgtcatggaggttgcatccggcgagtacggtgatcagaacagtcggctggtgagagcggttcgggagggcatgtgtgactcagaccacaagagagacctcgggggtgatgccgaggtgaacccttttctttggcaccgcccctctgaagaggtaaagcagacaaaacgattaaaggggttgagaaaggactcctcgtccatggaaggctgccacagcttctctgccagctgcctcacgcagttctgcatcctcttcaagaggaccttcctcagcatcatgagggactcggtcctgacacacctgcgcatcacctcgcacattgggatcggcctcctcattggcctgctgtacttggggatcgggaacgaaaccaagaaggtcttgagcaactccggcttcctcttcttctccatgctgttcctcatgttcgcggccctcatgcctactgttctgacatttcccctggagatgggagtctttcttcgggaacacctgaactactggtacagcctgaaggcctactacctggccaagaccatggcagacgtgccctttcagatcatgttcccagtggcctactgcagcatcgtgtactggatgacgtcgcagccgtccgacgccgtgcgctttgtgctgtttgccgcgctgggcaccatgacctccctggtggcacagtccctgggcctgctgatcggagccgcctccacgtccctgcaggtggccactttcgtgggcccagtgacagccatcccggtgctcctgttctcggggttcttcgtcagcttcgacaccatccccacgtacctacagtggatgtcctacatctcctatgtcaggtatgggttcgaaggggtcatcctctccatctatggcttagaccgggaagatctgcactgtgacatcgacgagacgtgccacttccagaagtcggaggccatcctgcgggagctggacgtggaaaatgccaagctgtacctggacttcatcgtactcgggattttcttcatctccctccgcctcattgcctatttggtcctcaggtacaaaatccgggcagagaggtaaaacacctgaatgccaggaaacaggaagattagacactgtggccgagggcacgtctagaatcgaggaggcaagcctgtgcccgaccgacgacacagagactcttctgatccaacccctagaaccgcgttgggtttgtgggtgtctcgtgctcagccactctgcccagctgggttggatcttctctccattcccctttctagctttaactaggaagatgtaggcagattggtggttttttttttttttttaacatacagaattttaaataccacaactggggcagaatttaaagctgcaacacagctggtgatgagaggcttcctcagtccagtcgctccttagcaccaggcaccgtgggtcctggatggggaactgcaagcagcctctcagctgatggctgcacagtcagatgtctggtggcagagagtccgagcatggagcgattccattttatgactgttgtttttcacattttcatctttctaaggtgtgtctcttttccaatgagaagtcatttttgcaagccaaaagtcgatcaatcgcattcattttaagaaattatacctttttagtacttgctgaagaatgattcagggtaaatcacatactttgtttagagaggcgaggggtttaacccgagtcacccagctggtctcatacatagacagcacttgtgaaggattgaatgcaggttccaggtggagggaagacgtggacaccatctccactgagccatgcagacatttttaaaagctatacacaaaattgtgagaagacattggccaactctttcaaagtctttctttttccacgtgcttcttattttaagcgaaatatattgtttgtttcttcctaaaaaaaaaaaaaaaaaaaaa

SEQ ID NO: 168 - DNA, 1400 bp, Homo sapiens
cggcaaaaaaaaaaggcgtaagaattttgaagctatgttcaaaggtatccttcagagtggattggataacttcgtgataaaccacatgctaaagaacaacgtggctggacaaacatctatccagaccctagtacctaatacggatcaaaagtcgaccagtgtaaaaaaagacaaccacaaaaaaaaaacagttaagatgttggaatacctgggcaaagatgttcttcatggtgtttttaattatttggcaaaacacgatgttctgacattgaaggaagaggaaaagaaaaaatattatgatgccaaaattgaagacaaggccctgatcttggtagactctttgcgaaagaatcgcgtggctcatcaaatgtttacccaaacacttctcaatatggaccaaaagatcaccagtgtaaaacctcttctgcaaatcgaggctggaccacctgagtcagcagaatctacaaatatactcaaactttgtcctcgtgaagaattcctgagactgtgtaaaaaaaatcatgatgagatctatccaataaaaaagagagaggaccgcagacgcctggctctcatcatatgcaatacaaagtttgatcacctgcctgcaaggaatggggctcactatgacatcgtggggatgaaaaggctgcttcaaggcctgggctacactgtggttgacgaaaagaatctcacagccagggatatggagtcagtgctgagggcatttgctgccagaccagagcacaagtcctctgacagcacgttcttggtactcatgtctcatggcatcctagagggaatctgcggaactgcgcataaaaagaaaaaaccggatgtgctgctttatgacaccatcttccagatattcaacaaccgcaactgcctcagtctaaaggacaaacccaaggtcatcattgtccaggcctgcagaggtgaaaaacatggggaactctgggtcagagactctccagcatccttggcagtcatctcttcacagtcatctgagaacctggaggcagattctgtttgcaagatccacgaggagaaggacttcattgctttctgttcttcaacaccacataacgtgtcctggagagaccgcacaaggggctccatcttcattacggaactcatcacatgcttccagaaatattcttgctgctgccacctaatggaaatatttcggaaggtacagaaatcatttgaagttccacaggctaaagcccagatgcccaccatagaacgagcaaccttgacaagagatttctacctctttcctggcaattgaaaatgaaaccacaggcagcccagccctcctctgtcaacatcaaagagcacatttaccagtatagcttgcatagtcaatatttggtatttcaataaaagtaaagactgta

SEQ ID NO: 169 - DNA, 3568 bp, Homo sapiens
atagttttcaggttaagaaagccagaatctttgttcagccacactgactgaacagacttttagtggggttacctggctaacagcagcagcggcaacggcagcagcagcagcagcagcagcagcagcagcagcagggctcctgggataactcaggcatagttcaacactatgggtcctcctctgaagctcttcaaaaaccagaaataccaggaactgaagcaggaatgcatcaaagacagcagacttttctgtgatccaacatttctgcctgagaatgattctcttttctacaaccgactgcttcctggaaaggtggtgtggaaacgtccccaggacatctgtgatgacccccatctgattgtgggcaacattagcaaccaccagctgacccaagggagactggggcacaagccaatggtttctgcattttcctgtttggctgttcaggagtctcattggacaaagacaattcccaaccataaggaacaggaatgggaccctcaaaaaacagaaaaatacgctgggatatttcactttcgtttctggcattttggagaatggactgaagtggtgattgatgacttgttgcccaccattaacggagatctggtcttctctttctccacttccatgaatgagttttggaatgctctgctggaaaaagcttatgcaaagctgctaggctgttatgaggccctggatggtttgaccatcactgatattattgtggacttcacgggcacattggctgaaactgttgacatgcagaaaggaagatacactgagcttgttgaggagaagtacaagctattcggagaactgtacaaaacatttaccaaaggtggtctgatctgctgttccattgagtctcccaatcaggaggagcaagaagttgaaactgattggggtctgctgaagggccatacctataccatgactgatattcgcaaaattcgtcttggagagagacttgtggaagtcttcagtgctgagaaggtgtatatggttcgcctgagaaaccccttgggaagacaggaatggagtggcccctggagtgaaatttctgaagagtggcagcaactgactgcatcagatcgcaagaacctggggcttgttatgtctgatgatggagagttttggatgagcttggaggacttttgccgcaactttcacaaactgaatgtctgccgcaatgtgaacaaccctatttttggccgaaaggagctggaatcggtgttgggatgctggactgtggatgatgatcccctgatgaaccgctcaggaggctgctataacaaccgtgataccttcctgcagaatccccagtacatcttcactgtgcctgaggatgggcacaaggtcattatgtcactgcagcagaaggacctgcgcacttaccgccgaatgggaagacctgacaattacatcattggctttgagctcttcaaggtggagatgaaccgcaaattccgcctccaccacctctacatccaggagcgtgctgggacttccacctatattgacacccgcacagtgtttctgagcaagtacctgaagaagggcaactatgtgcttgtcccaaccatgttccagcatggtcgcaccagcgagtttctcctgagaatcttctctgaagtgcctgtccagctcagggaactgactctggacatgcccaaaatgtcctgctggaacctggctcgtggctacccgaaagtagttactcagatcactgttcacagtgctgaggacctggagaagaagtatgccaatgaaactgtaaacccatatttggtcatcaaatgtggaaaggaggaagtccgttctcctgtccagaagaatacagttcatgccatttttgacacccaggccattttctacagaaggaccactgacattcctattatagtacaggtctggaacagccgaaaattctgtgatcagttcttggggcaggttactctggatgctgaccccagcgactgccgtgatctgaagtctctgtacctgcgtaagaagggtggtccaactgccaaagtcaagcaaggccacatcagcttcaaggttatttccagcgatgatctcactgagctctaaatctgcaatcccagagaatcctgacaaagcgtgccacccttttattttccgtcaggtgccaggtcttagttaagattcacaatctttagaaagaatgagattcacaataattaactcttcctctcttctgataaattccccatacctcccaatccaagtagcatctgtagctacataacctatatacctccagcagctggacatggggaggcgacagtcctatctagacatcatacacatttgccaagaaaggatctctggggcttccgggggtgagattcaagcaggacaataacaagaggctggacaccctacagatgtctttgatgttttcagttgtttgatatatctcccctgtagggcatgttgaggaaggaggagggctgatcaaggccaagctggtctagcctgacatcctagctcctgactgaacactatagacttcccagcagcatttcacccagcagccagagccggctttaagtccccaacccttacagacaccactgccaccaccaccaaccacgaccaccaccaccaccaccactcaccaccatcatcacctccggaaagtgtagtcctgccctaacccaagtcacccccgacagtaaattttaccttcatgttgagaaagcttcctggtgcttaatcaagagctggagttcaatgagtcctagacagtgagaggggcctgagcttcagctcaatggaagcctgctgtgtgccacaagacggaaaagtggaagaagctgcagtgggagacaaagcctcggtcccccacccatccacacacacctacactcacacacgcgcacatgggcgcgcacgaactaccattcaggcagtcagtgggcaagaggaaagataagtaagtaccatacacacctaaaagatgagagaattcatccagacatattacagccagtttggggcccctgactgcaatgtgaaacctctcgctgctgctaggtttacaaacaagcccattgtcctgtgcctcctaatatcatttgtactgaagaccccatctggggacttgagactttggtcccagcccagactcctcagacttttctctcagttgggatgcttcactcgctgggggtgtttgtttgccctctcatttttcagtacttctacagaattttctctagagtcagtcattatgaaatgtacttccctccatcttaacctatcaactttctgcccctccttcaaggcccagtataaatgccacctcctccatgaagccttccctaattccaccccaaacccccaccttcaacaatatttcaacgcttctgcaatgatgaaaaagaaacatagttgtagtacttagcctacctagaccagcaagcattcatttttagctcgctcattttttaccatgttttccagtctgtttaacttctgcagtgccttcactacactgccttacataaaccaaatcacaataaagttcatattcagtaca

SEQ ID NO: 170 - DNA, 946 bp, Homo sapiens
ggaaacccaagaggaaatgactgagcccgtctgggtccccgcccgctcgcgctcccctggccacaccctccgcctggacgcagcagccaccgccgcgtccctctctccacgaggctgccggcttaggacccccagctccgacatgtcgccctctggtcgcctgtgtcttctcaccatcgttggcctgattctccccaccagaggacagacgttgaaagataccacgtccagttcttcagcagactcaactatcatggacattcaggtcccgacacgagccccagatgcagtctacacagaactccagcccacctctccaaccccaacctggcctgctgatgaaacaccacaaccccagacccagacccagcaactggaaggaacggatgggcctctagtgacagatccagagacacacaagagcaccaaagcagctcatcccactgatgacaccacgacgctctctgagagaccatccccaagcacagacgtccagacagacccccagaccctcaagccatctggttttcatgaggatgaccccttcttctatgatgaacacaccctccggaaacgggggctgttggtcgcagctgtgctgttcatcacaggcatcatcatcctcaccagtggcaagtgcaggcagctgtcccggttatgccggaatcgttgcaggtgagtccatcagaaacaggagctgacaacctgctgggcacccgaagaccaagccccctgccagctcaccgtgcccagcctcctgcatcccctcgaagagcctggccagagagggaagacacagatgatgaagctggagccagggctgccggtccgagtctcctacctcccccaaccctgcccgcccctgaaggctacctggcgccttgggggctgtccctcaagttatctcctctgctaagacaaaaagtaaagcactgtggtctttgcc

SEQ ID NO: 171 - DNA, 3541 bp, Homo sapiens
  misc_feature 1282, 1522, 1840, 1841, 1845, 1851, 1855, 1864, 1903, 2109,2218, 2476, 2488, 2574, 2734, 2753, 2774, 3259, 3381, 3398: n = A,T,C or G
cgcggccgcagccgcattgcccgctcggcgtccggcccccgacccgcgctcgtccgcccgcccgcccgcccgcccgcgccatgaacgccaaggtcgtggtcgtgctggtcctcgtgctgaccgcgctctgcctcagcgacgggaagcccgtcagcctgagctacagatgcccatgccgattcttcgaaagccatgttgccagagccaacgtcaagcatctcaaaattctcaacactccaaactgtgcccttcagattgtagcccggctgaagaacaacaacagacaagtgtgcattgacccgaagctaaagtggattcaggagtacctggagaaagctttaaacaagaggttcaagatgtgagagggtcagacgcctgaggaacccttacagtaggagtccagctctgaaaccagtgttagggaagggcctgccacagcctcccctgccagggcagggccccaggcattgccaagggctttgttttggacactttgccatattttcaccatttgattatgtagcaaaatacatgacatttatttttcatttagtttgattattcagtgtcactggcgacacgtagcagcttagactaaggccattattgtacttgccttattagagtgtctttccacggagccactcctctgactcagggctcctgggttttggattctctgagctgtgcaggtggggagactgggctgagggagcctggccccatggtcagccctagggtggagagccaccaagagggacgcctgggggtgtcaggaccagtcaacctgggcaaagcctagtgaaggcttctctctgtgggatgggatggtggagggccacatgggaggttcacccccttctccatccacatggtgagccgggtctgcctcttctgggagggcagcagggctaccctgagctgaggcagcagtgtgaggccagggcagagtgagacccagccctcatcccgagcacctccacatcctccacgttctgctcatcattctctgtctcatccatcatcatgtgtgtccacgactgtctccatggccccgcaaaaggactctcaggaccaaagctttcatgtaaactgtgcaccaagcaggaaatgaaaatgtcttgtgttacctgaaaacactgtgcacatctgtgtcttgtttggaatattgtccattgtccaatcctatgtttttggtcaaagccagcgtcctcctctgtgaccaatgtcttgatgcatgcactgttccccctgtgcagccgctgagcgaggagatgctccntgggccctttgagtgcagtcctgatcagagccgtggtcctttggggtgaactaccttggttcccccactgatcacaaaaacatggtgggtccatgggcagagcccaagggaattcggtgtgcaccagggttgaccccagaggattgctgccccatcagtgctccctcacatgtcagtaccttcaaactagggccaagcccagcactgcttgaggaaaacaagcattcacaacttgttttnggtttttaaaacccagtccacaaaataaccaatcctggacatgaagattctttcccaattcacatctaacctcatcttcttcaccatttggcaatgccatcatctcctgccttcctcctgggccctctctgctctgcgtgtcacctgtgcttcgggcccttcccacaggacatttctctaagagaacaatgtgctatgtgaagagtaagtcaacctgcctgacatttggagtgttccccttccactgagggcagtcgatagagctgtattaagccacttaaaatgtttgtcactttgccaaggcaagcacttgtgggnnttgnttgttntcantcagtcttncgaatactttttccccttgataaagactccagttaaaanaaattttaatgaagaaagtggaaacaaggaagtcaaagcaaggaaactatgtaacatgtaggaagtaggaagtaaattatagtgatgtaatcttgaattgtaactgttcttgaatttaataatctgtagggtaattagtaacatgtgttaagtattttcataagtatttcaaattggagcttcatggcagaaggcaaacccatcancaaaaattgtcccttaaacaaaaattaaaatcctcaatccagctatgttatattgaaaaaatagagcctgagggatctttactagttataaagatacagaactctttcnaaaccttttgaaattaacctctcactataccagtataattgagttttcagtggggcagtcattatccaggtaatccaagatattttaaaatctgtcacgtagaacttggatgtacctgcccccaatccatgaaccaagaccattgaattcttggttgaggaaacaaacatgaccctaaatcttgactacagtcaggaaaggaatcatttctatttctcctccatgggagaaaatagataagagtagaaactgcagggnaaaattatttgnataacaattcctctactaacaatcagctccttcctggagactgcccagctaaagcaatatgcatttaaatacagtcttccatttgnaagggaaaagtctcttgtaatccgaatctctttttggtttcgaactgctagtcaagtgcgtccacgagctgtttactagggatccctcatctgtccctccgggacctggtgctgcctctacctgacactcccttgggctccctgtaacctcttcagaggncctcgctgccagctctgtntcaggacccagaggaaggggncagaggctcgttgactggctgtgtgttgggattgagtctgtgccacgtgtttgtgctgtggtgtgtcccctctgtccaggcactgagataccagcgaggaggctccagagggcgctctgcttgttattagagattacctcctgagaaaaaaggttccgcttggagcagaggggctgaatagcagaaggttgcacctcccccaaccttagatgttctaagtctttccattggatctcattggacccttccatggtgtgatcgtctgactggtgttatcaccgtgggctccctgactgggagttgatcgcctttcccaggtgctacacccttttccagctggatgagaatttgagtgctctgatccctctacagagcttccctgactcattctgaaggagccccattcctgggaaatattccctagaaacttccaaatcccctaagcagaccactgataaaaccatgtagaaaatttgttattttgnaacctcgctggactctcagtctctgagcagtgaatgattcagtgttaaatgtgatgaatactgtattttgtattgtttcaattgcatctcccagataatgtgaaaatggtccaggagaaggncaattcctatacgcagngtgctttaaaaaataaataagaaacaactctttgagaaacaacaatttctactttgaagtcataccaatgaaaaaatgtatatgcacttataattttcctaataaagttctgtactcaaatgtaaaaaaaaaaaaaaaaaaaa

SEQ ID NO: 172 - DNA, 925 bp, Homo sapiens
ggcacgagccgagatgtctcgctccgtggccttagctgtgctcgcgctactctctctttctggcctggaggctatccagcgtactccaaagattcaggtttactcacgtcatccagcagagaatggaaagtcaaatttcctgaattgctatgtgtctgggtttcatccatccgacattgaagttgacttactgaagaatggagagagaattgaaaaagtggagcattcagacttgtctttcagcaaggactggtctttctatctcttgtactacactgaattcacccccactgaaaaagatgagtatgcctgccgtgtgaaccatgtgactttgtcacagcccaagatagttaagtgggatcgagacatgtaagcagcatcatggaggtttgaagatgccgcatttggattggatgaattccaaattctgcttgcttgctttttaatattgatatgcttatacacttacactttatgcacaaaatgtagggttataataatgttaacatggacatgatcttctttataattctactttgagtgctgtctccatgtttgatgtatctgagcaggttgctccacaggtagctctaggagggctggcaacttagaggtggggagcagagaattctcttatccaacatcaacatcttggtcagatttgaactcttcaatctcttgcactcaaagcttgttaagatagttaagcgtgcataagttaacttccaatttacatactctgcttagaatttgggggaaaatttagaaatataattgacaggattattggaaatttgttataatgaatgaaacattttgtcatataagattcatatttacttcttatacatttgataaagtaaggcatggttgtggttaatctggtttatttttgttccacaagttaaataaatcataaaacttg

SEQ ID NO: 173 - DNA, 598 bp, Homo sapiens
cagagtcactcctgccttcaccatgaagtccagcggcctcttccccttcctggtgctgcttgccctgggaactctggcaccttgggctgtggaaggctctggaaagtccttcaaagctggagtctgtcctcctaagaaatctgcccagtgccttagatacaagaaacctgagtgccagagtgactggcagtgtccagggaagaagagatgttgtcctgacacttgtggcatcaaatgcctggatcctgttgacaccccaaacccaacaaggaggaagcctgggaagtgcccagtgacttatggccaatgtttgatgcttaacccccccaatttctgtgagatggatggccagtgcaagcgtgacttgaagtgttgcatgggcatgtgtgggaaatcctgcgtttcccctgtgaaagcttgattcctgccatatggaggaggctctggagtcctgctctgtgtggtccaggtcctttccaccctgagacttggctccaccactgatatcctcctttggggaaaggcttggcacacagcaggctttcaagaagtgccagttgatcaatgaataaataaacgagcctatttctctttgcac

SEQ ID NO: 174 - DNA, 2076 bp, Homo sapiens
agacagttttgaagttttcaaagactggctctgctgttaagaagttgtacttaaagcggaggagctaagccacctgccaaaatgtgcaaaggacttgcagctttgccccactcatgcctggaaagggccaaggagattaagatcaagttgggaattctcctccagaagccagactcagttggtgaccttgtcattccgtacaatgagaagccagagaaaccagccaagacccagaaaacctcgctggacgaggccctgcagtggcgtgattccctggacaaactcctgcagaacaactatggacttgccagtttcaaaagtttcctgaagtctgaattcagtgaggaaaaccttgagttctggattgcctgtgaggattacaagaagatcaagtcccctgccaagatggctgagaaggcaaagcaaatttatgaagaattcattcaaacggaggctcctaaagaggtgaatattgaccacttcactaaggacatcacaatgaagaacctggtggaaccttccctgagcagctttgacatggcccagaaaagaatccatgccctgatggaaaaggattctctgcctcgctttgtgcgctctgagttttatcaggagttaatcaagtagtaatttagccaggctatgaaatcatcctgtgagttatttcctccataataaccctgcatttcccattaatctacatatcttcccacagcagctttgctcagtgatacccacatgggaaaaatcccaggggatgttgcttactctttttgcccacactgctttggatacttatctactgtccgaaggccttctttccccactcaattcttcctgccctgttattaattaagatatcttcagcttgtagtcagacccaatcagaatcacagaaaaatcctgcctaaggcaaagaaatataagacaagactatgatatcaatgaatgtgggttaagtaatagatttccagctaaattggtctaaaaaagaatattaagtgtggacagacctatttcaaaggagcttaattgatctcacttgttttagttctgatccagggagatcacccctctaattatttctgaacttggttaataaaagtttataagatttttatgaagcagccactgtatgatattttaagcaaatatgttatttaaaatattgatccttcccttggaccaccttcatgttagttgggtattataaataagagatacaaccatgaatatattatgtttatacaaaatcaatctgaacacaattcataaagatttctcttttataccttcctcactggccccctccacctgcccatagtcaccaaattctgttttaaatcaatgacctaagatcaacaatgaagtattttataaatgtatttatgctgctagactgtgggtcaaatgtttccattttcaaattatttagaattcttatgagtttaaaatttgtaaatttctaaatccaatcatgtaaaatgaaactgttgctccattggagtagtctcccacctaaatatcaagatggctatatgctaaaaagagaaaatatggtcaagtctaaaatggctaattgtcctatgatgctattatcatagactaatgacatttatcttcaaaacaccaaattgtctttagaaaaattaatgtgattacaggtagaggccttctaggtgagacacttttaaggtacactgcattttgcagaaaaaaaaaaaaaaaagtaatcttttagcaaccccagtattccttcactatttcgcttcctgcattagcaaattttacttacagtcaaaagtgcagatttatactcctgacgtgtctcattcacagctaaataataggccataggacttttggtaggtttaaacttttaattctgtatttcatgattataagtcttgctagaattttttctaatctttagtagatttgattaaataatgattcacagaatttagtaacagaatcaaactaagccatgtatgagggtaatcgagatgaggatattaactcaaaagaaatagggtgatttttaaaggattaataaaattctgaaatgttaagtag

SEQ ID NO: 175 - DNA, 2691 bp, Homo sapiens
gcttgcccgtcggtcgctagctcgctcggtgcgcgtcgtcccgctccatggcgctcttcgtgcggctgctggctctcgccctggctctggccctgggccccgccgcgaccctggcgggtcccgccaagtcgccctaccagctggtgctgcagcacagcaggctccggggccgccagcacggccccaacgtgtgtgctgtgcagaaggttattggcactaataggaagtacttcaccaactgcaagcagtggtaccaaaggaaaatctgtggcaaatcaacagtcatcagctacgagtgctgtcctggatatgaaaaggtccctggggagaagggctgtccagcagccctaccactctcaaacctttacgagaccctgggagtcgttggatccaccaccactcagctgtacacggaccgcacggagaagctgaggcctgagatggaggggcccggcagcttcaccatcttcgcccctagcaacgaggcctgggcctccttgccagctgaagtgctggactccctggtcagcaatgtcaacattgagctgctcaatgccctccgctaccatatggtgggcaggcgagtcctgactgatgagctgaaacacggcatgaccctcacctctatgtaccagaattccaacatccagatccaccactatcctaatgggattgtaactgtgaactgtgcccggctcctgaaagccgaccaccatgcaaccaacggggtggtgcacctcatcgataaggtcatctccaccatcaccaacaacatccagcagatcattgagatcgaggacacctttgagacccttcgggctgctgtggctgcatcagggctcaacacgatgcttgaaggtaacggccagtacacgcttttggccccgaccaatgaggccttcgagaagatccctagtgagactttgaaccgtatcctgggcgacccagaagccctgagagacctgctgaacaaccacatcttgaagtcagctatgtgtgctgaagccatcgttgcggggctgtctgtagagaccctggagggcacgacactggaggtgggctgcagcggggacatgctcactatcaacgggaaggcgatcatctccaataaagacatcctagccaccaacggggtgatccactacattgatgagctactcatcccagactcagccaagacactatttgaattggctgcagagtctgatgtgtccacagccattgaccttttcagacaagccggcctcggcaatcatctctctggaagtgagcggttgaccctcctggctcccctgaattctgtattcaaagatggaacccctccaattgatgcccatacaaggaatttgcttcggaaccacataattaaagaccagctggcctctaagtatctgtaccatggacagaccctggaaactctgggcggcaaaaaactgagagtttttgtttatcgtaatagcctctgcattgagaacagctgcatcgcggcccacgacaagagggggaggtacgggaccctgttcacgatggaccgggtgctgacccccccaatggggactgtcatggatgtcctgaagggagacaatcgctttagcatgctggtagctgccatccagtctgcaggactgacggagaccctcaaccgggaaggagtctacacagtctttgctcccacaaatgaagccttccgagccctgccaccaagagaacggagcagactcttgggagatgccaaggaacttgccaacatcctgaaataccacattggtgatgaaatcctggttagcggaggcatcggggccctggtgcggctaaagtctctccaaggtgacaagctggaagtcagcttgaaaaacaatgtggtgagtgtcaacaaggagcctgttgccgagcctgacatcatggccacaaatggcgtggtccatgtcatcaccaatgttctgcagcctccagccaacagacctcaggaaagaggggatgaacttgcagactctgcgcttgagatcttcaaacaagcatcagcgttttccagggcttcccagaggtctgtgcgactagcccctgtctatcaaaagttattagagaggatgaagcattagcttgaagcactacaggaggaatgcaccacggcagctctccgccaatttctctcagatttccacagagactgtttgaatgttttcaaaaccaagtatcacactttaatgtacatgggccgcaccataatgagatgtgagccttgtgcatgtgggggaggagggagagagatgtactttttaaatcatgttccccctaaacatggctgttaacccactgcatgcagaaacttggatgtcactgcctgacattcacttccagagaggacctatcccaaatgtggaattgactgcctatgccaagtccctggaaaaggagcttcagtattgtggggctcataaaacatgaatcaagcaatccagcctcatgggaagtcctggcacagtttttgtaaagcccttgcacagctggagaaatggcatcattataagctatgagttgaaatgttctgtcaaatgtgtctcacatctacacgtggcttggaggcttttatggggccctgtccaggtagaaaagaaatggtatgtagagcttagatttccctattgtgacagagccatggtgtgtttgtaataataaaaccaaagaaacata

SEQ ID NO: 176 - DNA, 1096 bp, Homo sapiens
atgatcctaaacaaagctctgctgctgggggccctcgctctgaccaccgtgatgagcccctgtggaggtgaagacattgtggctgaccacgttgcctcttgtggtgtaaacttgtaccagttttacggtccctctggccagtacacccatgaatttgatggagatgagcagttctacgtggacctggagaggaaggagactgcctggcggtggcctgagttcagcaaatttggaggttttgacccgcagggtgcactgagaaacatggctgtggcaaaacacaacttgaacatcatgattaaacgctacaactctaccgctgctaccaatgaggttcctgaggtcacagtgttttccaagtctcccgtgacactgggtcagcccaacaccctcatttgtcttgtggacaacatctttcctcctgtggtcaacatcacatggctgagcaatgggcagtcagtcacagaaggtgtttctgagaccagcttcctctccaagagtgatcattccttcttcaagatcagttacctcaccttcctcccttctgctgatgagatttatgactgcaaggtggagcactggggcctggaccagcctcttctgaaacactgggagcctgagattccagcccctatgtcagagctcacagagactgtggtctgtgccctggggttgtctgtgggcctcatgggcattgtggtgggcactgtcttcatcatccaaggcctgcgttcagttggtgcttccagacaccaagggccattgtgaatcccatcctggaagggaaggtgcatcgccatctacaggagcagaagaatggacttgctaaatgacctagcactattctctggcccgatttatcatatcccttttctcctccaaatatttctcctctcaccttttctctgggacttaagctgctatatcccctcagagctcacaaatgcctttacattctttccctgacctcctgattttttttttcttttctcaaatgttacctacaatacatgcctggggtaagccacccggctacctaattcctcagtaacctccatctaaaatctccaaggaagcaataaattccttttatgag

SEQ ID NO: 177 - DNA, 3362 bp, Homo sapiens
aagcctctcggtctgtggcagcagcgttggcccggccccgggagcggagagcgaggggaggcggagacggaggaaggtctgaggagcagcttcagtccccgccgagccgccaccgcaggtcgaggacggtcggactcccgcggcgggaggagcctgttcccctgagggtatttgaagtataccatacaactgttttgaaaatccagcgtggacaatggctactcaagctgatttgatggagttggacatggccatggaaccagacagaaaagcggctgttagtcactggcagcaacagtcttacctggactctggaatccattctggtgccactaccacagctccttctctgagtggtaaaggcaatcctgaggaagaggatgtggatacctcccaagtcctgtatgagtgggaacagggattttctcagtccttcactcaagaacaagtagctgatattgatggacagtatgcaatgactcgagctcagagggtacgagctgctatgttccctgagacattagatgagggcatgcagatcccatctacacagtttgatgctgctcatcccactaatgtccagcgtttggctgaaccatcacagatgctgaaacatgcagttgtaaacttgattaactatcaagatgatgcagaacttgccacacgtgcaatccctgaactgacaaaactgctaaatgacgaggaccaggtggtggttaataaggctgcagttatggtccatcagctttctaaaaaggaagcttccagacacgctatcatgcgttctcctcagatggtgtctgctattgtacgtaccatgcagaatacaaatgatgtagaaacagctcgttgtaccgctgggaccttgcataacctttcccatcatcgtgagggcttactggccatctttaagtctggaggcattcctgccctggtgaaaatgcttggttcaccagtggattctgtgttgttttatgccattacaactctccacaaccttttattacatcaagaaggagctaaaatggcagtgcgtttagctggtgggctgcagaaaatggttgccttgctcaacaaaacaaatgttaaattcttggctattacgacagactgccttcaaattttagcttatggcaaccaagaaagcaagctcatcatactggctagtggtggaccccaagctttagtaaatataatgaggacctatacttacgaaaaactactgtggaccacaagcagagtgctgaaggtgctatctgtctgctctagtaataagccggctattgtagaagctggtggaatgcaagctttaggacttcacctgacagatccaagtcaacgtcttgttcagaactgtctttggactctcaggaatctttcagatgctgcaactaaacaggaagggatggaaggtctccttgggactcttgttcagcttctgggttcagatgatataaatgtggtcacctgtgcagctggaattctttctaacctcacttgcaataattataagaacaagatgatggtctgccaagtgggtggtatagaggctcttgtgcgtactgtccttcgggctggtgacagggaagacatcactgagcctgccatctgtgctcttcgtcatctgaccagccgacaccaagaagcagagatggcccagaatgcagttcgccttcactatggactaccagttgtggttaagctcttacacccaccatcccactggcctctgataaaggctactgttggattgattcgaaatcttgccctttgtcccgcaaatcatgcacctttgcgtgagcagggtgccattccacgactagttcagttgcttgttcgtgcacatcaggatacccagcgccgtacgtccatgggtgggacacagcagcaatttgtggagggggtccgcatggaagaaatagttgaaggttgtaccggagcccttcacatcctagctcgggatgttcacaaccgaattgttatcagaggactaaataccattccattgtttgtgcagctgctttattctcccattgaaaacatccaaagagtagctgcaggggtcctctgtgaacttgctcaggacaaggaagctgcagaagctattgaagctgagggagccacagctcctctgacagagttacttcactctaggaatgaaggtgtggcgacatatgcagctgctgttttgttccgaatgtctgaggacaagccacaagattacaagaaacggctttcagttgagctgaccagctctctcttcagaacagagccaatggcttggaatgagactgctgatcttggacttgatattggtgcccagggagaaccccttggatatcgccaggatgatcctagctatcgttcttttcactctggtggatatggccaggatgccttgggtatggaccccatgatggaacatgagatgggtggccaccaccctggtgctgactatccagttgatgggctgccagatctggggcatgcccaggacctcatggatgggctgcctccaggtgacagcaatcagctggcctggtttgatactgacctgtaaatcatcctttagctgtattgtctgaacttgcattgtgattggcctgtagagttgctgagagggctcgaggggtgggctggtatctcagaaagtgcctgacacactaaccaagctgagtttcctatgggaacaattgaagtaaactttttgttctggtcctttttggtcgaggagtaacaatacaaatggattttgggagtgactcaagaagtgaagaatgcacaagaatggatcacaagatggaatttagcaaaccctagccttgcttgttaaaatttttttttttttttttttaagaatatctgtaatggtactgactttgcttgctttgaagtagctctttttttttttttttttttttttttttgcagtaactgttttttaagtctctcgtagtgttaagttatagtgaatactgctacagcaatttctaatttttaagaattgagtaatggtgtagaacactaattaattcataatcactctaattaattgtaatctgaataaagtgtaacaattgtgtagcctttttgtataaaatagacaaatagaaaatggtccaattagtttcctttttaatatgcttaaaataagcaggtggatctatttcatgtttttgatcaaaaactatttgggatatgtatgggtagggtaaatcagtaagaggtgttatttggaaccttgttttggacagtttaccagttgccttttatcccaaagttgttgtaacctgctgtgatacgatgcttcaagagaaaatgcggttataaaaaatggttcagaattaaacttttaattcatt

SEQ ID NO: 178 - DNA, 847 bp, Homo sapiens
gcgagcggcttccgccgggctgctccgcgggcgcgtcggccatgagcgagttgccgggcgacgtgcgggcgtttctgcgggagcacccgagcctgcggctccagacggacgcccgcaaggtgaggtgcatcctgacaggtcacgagctgccctgccgcctgccggagctccaggtctacacccgcggcaaaaagtaccagcggctggtccgcgcctccccggccttcgactatgcagagttcgagccgcacatcgtgcccagcaccaagaacccgcaccagttgttctgcaaactcaccctgcggcacatcaacaagtgcccagaacacgtgctgaggcacacccagggccggcggtaccagcgagctctgtgtaaatatgaagaatgtcagaagcaaggggtggagtacgtgcctgcctgcctggtgcaccggaggaggaggagggaggaccagatggacggtgacgggcctcgcccgcgggaagccttctgggagcccacatccagtgatgaggggggagctgcaagtgatgacagcatgacagacctgtacccacctgagctattcaccagaaaggaccttggaagcacggaggatggggatggcactgatgactttttgacagacaaagaggatgagaaggcaaagcccccaagagagaaggccactgatgagggcaggagagagacgaccgtgtaccgagggctggtccagaagcgcgggaagaagcagttgggctcgttgaaaaagaagttcaagagtcatcaccgcaaacccaagagcttcagctcctgtaaacagccaggttaataaaagcacatgccgtgaaaaaaaaaaaaaaaaaa

SEQ ID NO: 179 - protein, 365 aa, Homo sapiens
MAVMAPRTLVLLLSGALALTQTWAGSHSMRYFYTSVSRPGRGEPRFIAVGYVDDTQFVRFDSDAASQRMEPRAPWIEQEGPEYWDRNTRNVKAHSQTDRESLRIALRYYNQSEDGSHTIQRMYGCDVGPDGRFLRGYQQDAYDGKDYIALNEDLRSWTAADMAAQITQRKWETAHEAEQWRAYLEGRCVEWLRRYLENGKETLQRTDAPKTHMTHHAVSDHEATLRCWALSFYPAEITLTWQRDGEDQTQDTELVETRPAGDGTFQKWASVVVPSGQEQRYTCHVQHEGLPKPLTLRWEPSSQPTIPIVGIIAGLVLFGAVIAGAVVAAVMWRRKSSDRKGGSYSQAASSDSAQGSDMSLTACKV

SEQ ID NO: 180 - DNA, 3257 bp, Homo sapiens
aacaggcgtgacgccagttctaaacttgaaacaaaacaaaacttcaaagtacaccaaaatagaacctccttaaagcataaatctcacggagggtctcggccgccagtggaaggagccaccgcccccgccccgaccatggccgaggagctggtcttagagaggtgtgatctggagctggagaccaatggccgagaccaccacacggccgacctgtgccgggagaagctggtggtgcgacggggccagcccttctggctgaccctgcactttgagggccgcaactaccaggccagtgtagacagtctcaccttcagtgtcgtgaccggcccagcccctagccaggaggccgggaccaaggcccgttttccactaagagatgctgtggaggagggtgactggacagccaccgtggtggaccagcaagactgcaccctctcgctgcagctcaccaccccggccaacgcccccatcggcctgtatcgcctcagcctggaggcctccactggctaccagggatccagctttgtgctgggccacttcattttgctcttcaacgcctggtgcccagcggatgctgtgtacctggactcggaagaggagcggcaggagtatgtcctcacccagcagggctttatctaccagggctcggccaagttcatcaagaacataccttggaattttgggcagtttcaagatgggatcctagacatctgcctgatccttctagatgtcaaccccaagttcctgaagaacgccggccgtgactgctcccggcgcagcagccccgtctacgtgggccgggtgggtagtggcatggtcaactgcaacgatgaccagggtgtgctgctgggacgctgggacaacaactacggggacggcgtcagccccatgtcctggatcggcagcgtggacatcctgcggcgctggaagaaccacggctgccagcgcgtcaagtatggccagtgctgggtcttcgccgccgtggcctgcacagtgctgaggtgcctaggcatccctacccgcgtcgtgaccaactacaactcggcccatgaccagaacagcaaccttctcatcgagtacttccgcaatgagtttggggagatccagggtgacaagagcgagatgatctggaacttccactgctgggtggagtcgtggatgaccaggccggacctgcagccggggtacgagggctggcaggccctggacccaacgccccaggagaagagcgaaggaacgtactgctgtggcccagttccagttcgtgccatcaaggagggcgacctgagcaccaagtacgatgcgccctttgtctttgcggaggtcaatgccgacgtggtagactggatccagcaggacgatgggtctgtgcacaaatccatcaaccgttccctgatcgttgggctgaagatcagcactaagagcgtgggccgagacgagcgggaggatatcacccacacctacaaatacccagaggggtcctcagaggagagggaggccttcacaagggcgaaccacctgaacaaactggccgagaaggaggagacagggatggccatgcggatccgtgtgggccagagcatgaacatgggcagtgactttgacgtctttgcccacatcaccaacaacaccgctgaggagtacgtctgccgcctcctgctctgtgcccgcaccgtcagctacaatgggatcttggggcccgagtgtggcaccaagtacctgctcaacctaaccctggagcctttctctgagaagagcgttcctctttgcatcctctatgagaaataccgtgactgccttacggagtccaacctcatcaaggtgcgggccctcctcgtggagccagttatcaacagctacctgctggctgagagggacctctacctggagaatccagaaatcaagatccggatccttggggagcccaagcagaaacgcaagctggtggctgaggtgtccctgcagaacccgctccctgtggccctggaaggctgcaccttcactgtggagggggccggcctgactgaggagcagaagacggtggagatcccagaccccgtggaggcaggggaggaagttaaggtgagaatggacctcgtgccgctccacatgggcctccacaagctggtggtgaacttcgagagcgacaagctgaaggctgtgaagggcttccggaatgtcatcattggccccgcctaagggacccctgctcccagcctgctgagagcccccaccttgatcccaatccttatcccaagctagtgagcaaaatatgccccttattgggccccagaccccagggcagggtgggcagcctatgggggctctcggaaatggaatgtgcccctggcccatctcagcctcctgagcctgtgggtccccactcaccccctttgctgtgaggaatgctctgtgccagaaacagtgggagccctgacctgtgctgactggggctggggtgagagaggaaagacctacattccctctcctgcccagatgccctttggaaagccattgaccacccaccatattgtttgatctacttcatagctccttggagcaggcaaaaaagggacagcatgcccttggctggatcaggaatccagctccctagactgcatcccgtacctcttcccatgactgcacccagctccaggggcccttgggacacccagagctgggtggggacagtgataggcccaaggtcccctccacatcccagcagcccaagcttaatagccctccccctcaacctcaccattgtgaagcacctactatgtgctgggtgcctcccacacttgctggggctcacggggcctccaacccatttaatcaccatgggaaactgttgtgggcgctgcttccaggataaggagactgaggcttagagagaggaggcagccccctccacaccagtggcctcgtggttataagcaaggctgggtaatgtgaaggcccaagagcagagtctgggcctctgactctgagtccactgctccatttataaccccagcctgacctgagactgtcgcagaggctgtctggggcctttatcaaaaaaagactcagccaagacaaggaggtagagaggggactgggggactgggagtcagagccctggctgggttcaggtcccacgtctggccagcgactgccttctcctctctgggcctttgtttccttgttggtcagaggagtgattgaacctgctcatctccaaggatcctctccactccatgtttgcaatacacaattcc

SEQ ID NO: 181 - DNA, 1897 bp, Homo sapiens
ctccgaacaggaagaggacgaaaaaaataaccgtccgcgacgccgagacaaaccggacccgcaaccaccatgaacagcaaaggtcaatatccaacacagccaacctaccctgtgcagcctcctgggaatccagtataccctcagaccttgcatcttcctcaggctccaccctataccgatgctccacctgcctactcagagctctatcgtccgagctttgtgcacccaggggctgccacagtccccaccatgtcagccgcatttcctggagcctctctgtatcttcccatggcccagtctgtggctgttgggcctttaggttccacaatccccatggcttattatccagtcggtcccatctatccacctggctccacagtgctggtggaaggagggtatgatgcaggtgccagatttggagctggggctactgctggcaacattcctcctccacctcctggatgccctcccaatgctgctcagcttgcagtcatgcagggagccaacgtcctcgtaactcagcggaaggggaacttcttcatgggtggttcagatggtggctacaccatctggtgaggaaccaaggccacctctgtgccgggaaagacatcacataccttcagcacttctcacaatgtaactgctttagtcatattaacctgaagttgcagtttagacacatgttgttggggtgtctttctggtgcccaaactttcaggcacttttcaaatttaataaggaaccatgtaatggtagcagtacctccctaaagcattttgaggtaggggaggtatccattcataaaatgaatgtgggtgaagccgccctaaggattttcctttaatttctctggagtaatactgtaccatactggtctttgcttttagtaataaaacatcaaattaggtttggagggaactttgatcttcctaagaattaaagttgccaaattattctgattggtctttaatctcctttaagtctttgatatatattacttgttataaatggaacgcattagttgtctgccttttcctttccatcccttgccccacccatcccatctccaaccctagtcttccatttcctcccgccagtctccattgaatcaatggtgcaggacagaaagccagtcagactaatttccttctttcctcgcacttctccccactcgtcatcttttaactagtgtttcacaaggatcctctgaaaccctctctgtgccccaagtacagatgccattacttctgctttcgtatctcctcaggcaaaagtggagggtgccttatgggccctcctcataggttgtctctgcatacacgaacctaacccaaatttgctttggtgccagaaaaactgagctatgtttgaacaaagatgtcgtgcaaactgtactgtgaacaacagttggtttaaaatatgaggggcaaggaggaggatgcatttcaaaagcttgattgatgtgttcagagctaaattaagaggagttttcagatcaaaaactggttaccattttttgtcagagtgtctgatgcggccactcattcggctccccagaattcctagactgggttaatagggtcatattgtgaatgtctcactacaaaatgacttgagtccagtgaaatctcattagggtttaagaatatttcagggatccttaatgttttgatttttgttttctgaaattggattttattttattttatcttataatttcagttcatctaaattgtgtgttctgtacatgtgatgtttgactgtaccattgactgttatggaagttcagcgttgtatgtctctctctacactgtggtgcacttaacttgtggaatttttatactaaaaatgtagaataaagactattttgaagatttgaataaagtgatgaagttgc

SEQ ID NO: 182 - DNA, 3213 bp, Homo sapiens
agagactcaagatgattccctttttacccatgttttctctactattgctgcttattgttaaccctataaacgccaacaatcattatgacaagatcttggctcatagtcgtatcaggggtcgggaccaaggcccaaatgtctgtgcccttcaacagattttgggcaccaaaaagaaatacttcagcacttgtaagaactggtataaaaagtccatctgtggacagaaaacgactgttttatatgaatgttgccctggttatatgagaatggaaggaatgaaaggctgcccagcagttttgcccattgaccatgtttatggcactctgggcatcgtgggagccaccacaacgcagcgctattctgacgcctcaaaactgagggaggagatcgagggaaagggatccttcacttactttgcaccgagtaatgaggcttgggacaacttggattctgatatccgtagaggtttggagagcaacgtgaatgttgaattactgaatgctttacatagtcacatgattaataagagaatgttgaccaaggacttaaaaaatggcatgattattccttcaatgtataacaatttggggcttttcattaaccattatcctaatggggttgtcactgttaattgtgctcgaatcatccatgggaaccagattgcaacaaatggtgttgtccatgtcattgaccgtgtgcttacacaaattggtacctcaattcaagacttcattgaagcagaagatgacctttcatcttttagagcagctgccatcacatcggacatattggaggcccttggaagagacggtcacttcacactctttgctcccaccaatgaggcttttgagaaacttccacgaggtgtcctagaaaggttcatgggagacaaagtggcttccgaagctcttatgaagtaccacatcttaaatactctccagtgttctgagtctattatgggaggagcagtctttgagacgctggaaggaaatacaattgagataggatgtgacggtgacagtataacagtaaatggaatcaaaatggtgaacaaaaaggatattgtgacaaataatggtgtgatccatttgattgatcaggtcctaattcctgattctgccaaacaagttattgagctggctggaaaacagcaaaccaccttcacggatcttgtggcccaattaggcttggcatctgctctgaggccagatggagaatacactttgctggcacctgtgaataatgcattttctgatgatactctcagcatggttcagcgcctccttaaattaattctgcagaatcacatattgaaagtaaaagttggccttaatgagctttacaacgggcaaatactggaaaccatcggaggcaaacagctcagagtcttcgtatatcgtacagctgtctgcattgaaaattcatgcatggagaaagggagtaagcaagggagaaacggtgcgattcacatattccgcgagatcatcaagccagcagagaaatccctccatgaaaagttaaaacaagataagcgctttagcaccttcctcagcctacttgaagctgcagacttgaaagagctcctgacacaacctggagactggacattatttgtgccaaccaatgatgcttttaagggaatgactagtgaagaaaaagaaattctgatacgggacaaaaatgctcttcaaaacatcattctttatcacctgacaccaggagttttcattggaaaaggatttgaacctggtgttactaacattttaaagaccacacaaggaagcaaaatctttctgaaagaagtaaatgatacacttctggtgaatgaattgaaatcaaaagaatctgacatcatgacaacaaatggtgtaattcatgttgtagataaactcctctatccagcagacacacctgttggaaatgatcaactgctggaaatacttaataaattaatcaaatacatccaaattaagtttgttcgtggtagcaccttcaaagaaatccccgtgactgtctatacaactaaaattataaccaaagttgtggaaccaaaaattaaagtgattgaaggcagtcttcagcctattatcaaaactgaaggacccacactaacaaaagtcaaaattgaaggtgaacctgaattcagactgattaaagaaggtgaaacaataactgaagtgatccatggagagccaattattaaaaaatacaccaaaatcattgatggagtgcctgtggaaataactgaaaaagagacacgagaagaacgaatcattacaggtcctgaaataaaatacactaggatttctactggaggtggagaaacagaagaaactctgaagaaattgttacaagaagaggtcaccaaggtcaccaaattcattgaaggtggtgatggtcatttatttgaagatgaagaaattaaaagactgcttcagggagacacacccgtgaggaagttgcaagccaacaaaaaagttcaaggttctagaagacgattaagggaaggtcgttctcagtgaaaatccaaaaaccagaaaaaaatgtttatacaaccctaagtcaataacctgaccttagaaaattgtgagagccaagttgacttcaggaactgaaacatcagcacaaagaagcaatcatcaaataattctgaacacaaatttaatatttttttttctgaatgagaaacatgagggaaattgtggagttagcctcctgtggtaaaggaattgaagaaaatataacaccttacaccctttttcatcttgacattaaaagttctggctaactttggaatccattagagaaaaatccttgtcaccagattcattacaattcaaatcgaagagttgtgaactgttatcccattgaaaagaccgagccttgtatgtatgttatggatacataaaatgcacgcaagccattatctctccatgggaagctaagttataaaaataggtgcttggtgtacaaaactttttatatcaaaaggctttgcacatttctatatgagtgggtttactggtaaattatgttattttttacaactaattttgtactctcagaatgtttgtcatatgcttcttgcaatgcatattttttaatctcaaacgtttcaataaaaccatttttcagatataaagagaattacttcaaattgagtaattcagaaaaactcaagatttaagttaaaaagtggtttggacttgggaa

SEQ ID NO: 183 - DNA, 2455 bp, Homo sapiens
gaattcgggcgggcttcttcgctgccgacgtacgacgagtggccgggctcttgcgtctggtaacgcgctgtctctaacgccagcgccgtctcgcgcgcactgcgcacagaccacccgcagacgcccggcagtccgcaggcccaaacgcgcacgcgaccccgctctccgcaccgtacccggccgcctcggcatggcgccccgcagcgcccggcgacccctgctgctgctactgcctgttgctgctgctcggcctcatgcattgtcgtcagcagccatgtttatggtgaaaaatggcaacgggaccgcgtgcataatggccaacttctctgctgccttctcagtgaactacgacaccaagagtggccccaagaacatgacctttgacctgccatcagatgccacagtggtgctcaaccgcagctcctgtggaaaagagaacacttctgaccccagtctcgtgattgcttttggaagaggacatacactcactctcaatttcacgagaaatgcaacacgttacagcgttcagctcatgagttttgtttataacttgtcagacacacaccttttccccaatgcgagctccaaagaaatcaagactgtggaatctataactgacatcagggcagatatagataaaaaatacagatgtgttagtggcacccaggtccacatgaacaacgtgaccgtaacgctccatgatgccaccatccaggcgtacctttccaacagcagcttcagcaggggagagacacgctgtgaacaagacaggccttccccaaccacagcgccccctgcgccacccagcccctcgccctcacccgtgcccaagagcccctctgtggacaagtacaacgtgagcggcaccaacgggacctgcctgctggccagcatggggctgcagctgaacctcacctatgagaggaaggacaacacgacggtgacaaggcttctcaacatcaaccccaacaagacctcggccagcgggagctgcggcgcccacctggtgactctggagctgcacagcgagggcaccaccgtcctgctcttccagttcgggatgaatgcaagttctagccggtttttcctacaaggaatccagttgaatacaattcttcctgacgccagagaccctgcctttaaagctgccaacggctccctgcgagcgctgcaggccacagtcggcaattcctacaagtgcaacgcggaggagcacgtccgtgtcacgaaggcgttttcagtcaatatattcaaagtgtgggtccaggctttcaaggtggaaggtggccagtttggctctgtggaggagtgtctgctggacgagaacagcacgctgatccccatcgctgtgggtggtgccctggcggggctggtcctcatcgtcctcatcgcctacctcgtcggcaggaagaggagtcacgcaggctaccagactatctagcctggtgcacgcaggcacagcagctgcaggggcctctgttcctttctctgggcttagggtcctgtcgaaggggaggcacactttctgcaaacgtttctcaaatctgcttcatccaatgtgaagttcatcttgcagcatttactatgcacaacagagtaactatcgaaatgacggtgttaattttgctaactgggttaaatattttgctaactggttaaacattaatatttaccaaagtaggattttgagggtgggggtgctctctctgagggggtgggggtgccgctgtctctgaggggtgggggtgccgctgtctgaggggtgggggtgccgctctctctgagggggtgggggtgccgctttctctgagggggtgggggtgccgctctctctgagggggtgggggtgctgctctctccgaggggtggaatgccgctgtctctgaggggtgggggtgccgctctaaattggctccatatcattgagtttagggttctggtgtttggtttcttcattctttactgcactcagatttaagccttacaaagggaaacctctggccgtcacacgtaggacgcatgaaggtcactcgtgtgaggctgacatgctcacacattacaacagtagagagggaaaatcctaagacagaggaactccagagatgagtgtctggagcggcttcagttcagctttaaaggccaggacgcgcgacacgtggctggcggcctcgttccagtggcggcacgtccttggcgtctctaatgtctgcagctcaagggctggcacttttttaaatataaaaatggtgttatttttatttttttttgtaaagtgatttttggtcttctgttgacattcgggtgatcctgttctgcgctgtgtacaatgtgagatcggtgcgttctcctgatgttttgccgtggcttggggattgtacacgggaccagctcacgtaatgcattgcctgtaacaatgtaataaaaagcctctttctttcaaaaaaaccccgaattc

SEQ ID NO: 184 - DNA, 848 bp, Homo sapiens
agcggcctggctaactcctgccaggcagtgcccttcccggagcgtgccctcgccgctgagctcccctgaacagcagctgcagcagccatggccccgccctgggtgcccgccatgggcttcacgctggcgcccagcctggggtgcttcgtgggctcccgctttgtccacggcgagggtctccgctggtacgccggcctgcagaagccctcgtggcacccgccccactgggtgctgggccctgtctggggcacgctctactcagccatggggtacggctcctacctggtctggaaagagctgggaggcttcacagagaaggctgtggttcccctgggcctctacactgggcagctggccctgaactgggcatggccccccatcttctttggtgcccgacaaatgggctgggccttggtggatctcctgctggtcagtggggcggcggcagccactaccgtggcctggtaccaggtgagcccgctggccgcccgcctgctctacccctacctggcctggctggccttcgcgaccacactcaactactgcgtatggcgggacaaccatggctggcatgggggacggcggctgccagagtgagtgcccggcccaccagggactgcagctgcaccagcaggtgccatcacgcttgtgatgtggtggccgtcacgctttcatgaccactgggcctgctagtctgtcagggccttggcccaggggtcagcagagcttcagaggttgccccacctgagcccccacccgggagcagtgtcctgtgctttctgcatgcttagagcatgttcttggaacatggaattttataagctgaataaagtttttgacttccttta

SEQ ID NO: 185 - DNA, 3502 bp, Homo sapiens
acatgacagcagatccgcggaagggcagaatgggactccaagcctgcctcctagggctctttgccctcatcctctctggcaaatgcagttacagcccggagcccgaccagcggaggacgctgcccccaggctgggtgtccctgggccgtgcggaccctgaggaagagctgagtctcacctttgccctgagacagcagaatgtggaaagactctcggagctggtgcaggctgtgtcggatcccagctctcctcaatacggaaaatacctgaccctagagaatgtggctgatctggtgaggccatccccactgaccctccacacggtgcaaaaatggctcttggcagccggagcccagaagtgccattctgtgatcacacaggactttctgacttgctggctgagcatccgacaagcagagctgctgctccctggggctgagtttcatcactatgtgggaggacctacggaaacccatgttgtaaggtccccacatccctaccagcttccacaggccttggccccccatgtggactttgtggggggactgcaccgttttcccccaacatcatccctgaggcaacgtcctgagccgcaggtgacagggactgtaggcctgcatctgggggtaaccccctctgtgatccgtaagcgatacaacttgacctcacaagacgtgggctctggcaccagcaataacagccaagcctgtgcccagttcctggagcagtatttccatgactcagacctggctcagttcatgcgcctcttcggtggcaactttgcacatcaggcatcagtagcccgtgtggttggacaacagggccggggccgggccgggattgaggccagtctagatgtgcagtacctgatgagtgctggtgccaacatctccacctgggtctacagtagccctggccggcatgagggacaggagcccttcctgcagtggctcatgctgctcagtaatgagtcagccctgccacatgtgcatactgtgagctatggagatgatgaggactccctcagcagcgcctacatccagcgggtcaacactgagctcatgaaggctgccgctcggggtctcaccctgctcttcgcctcaggtgacagtggggccgggtgttggtctgtctctggaagacaccagttccgccctaccttccctgcctccagcccctatgtcaccacagtgggaggcacatccttccaggaacctttcctcatcacaaatgaaattgttgactatatcagtggtggtggcttcagcaatgtgttcccacggccttcataccaggaggaagctgtaacgaagttcctgagctctagcccccacctgccaccatccagttacttcaatgccagtggccgtgcctacccagatgtggctgcactttctgatggctactgggtggtcagcaacagagtgcccattccatgggtgtccggaacctcggcctctactccagtgtttggggggatcctatccttgatcaatgagcacaggatccttagtggccgcccccctcttggctttctcaacccaaggctctaccagcagcatggggcaggactctttgatgtaacccgtggctgccatgagtcctgtctggatgaagaggtagagggccagggtttctgctctggtcctggctgggatcctgtaacaggctggggaacacccaacttcccagctttgctgaagactctactcaacccctgaccctttcctatcaggagagatggcttgtcccctgccctgaagctggcagttcagtcccttattctgccctgttggaagccctgctgaaccctcaactattgactgctgcagacagcttatctccctaaccctgaaatgcggtgagcttgacttgactcccaaccctaccatgctccatcatactcaggtctccctactcctgccttagattcctcaataagatgctgtaactagcattttttgaatgcctctccctccgcatctcatctttctcttttcaatcaggcttttccaaagggttgtatacagactctgtgcactatttcacttgatattcattccccaattcactgcaaggagacctctactgtcaccgtttactctttcctaccctgacatccagaaacaatggcctccagtgcatacttctcaatctttgctttatggcctttccatcatagttgcccactccctctccttacttagcttccaggtcttaacttctctgactactcttgtcttcctctctcatcaatttctgcttcttcatggaatgctgaccttcattgctccatttgtagatttttgctcttctcagtttactcattgtcccctggaacaaatcactgacatctacaaccattaccatctcactaaataagactttctatccaataatgattgatacctcaaatgtaagatgcgtgatactcaacatttcatcgtccaccttcccaaccccaaacaattccatctcgtttcttcttggtaaatgatgctatgctttttccaaccaagccagaaacctgtgtcatcttttcaccccaccttcaatcaacaagtcctcaatcaacaagtcctactgactgcacatcttaaatatatctttatcagtccacaagtccttccaattatatttcccaagtatatctagaacttatccacttatatccccactgctactaccttagtttagggctatattctcttgaaaaaaagtgtccttacttcctgccaatccccaagtcatcttccagagtaaaatgcaaatcccatcaggccacttggatgaaaacccttcaaggattactggatagaattcaggctttcccctccagcccccaatcatagctcacaaaccttccttgctatttgttcttaagtaaaaaatcatttttcctcctccctccccaaaccccaaggaactctcactcttgctcaagctgttccgtccccttaccacccctgatacaactgccaggttaatttccagaattcttgcaagactcagttcagaagtcaccttctttcgtgaatgttttgattccctgaggctactttattttggtatggctgaaaaatcctagattttctaaacaaaacctgtttgaatcttggttctgatatggactaggagagagactgggtcaagtaagcttatctccctgaggctgtttcctcgtctgttaagtgtgaatatcaatacctgcctttcataatcaccagggaataaagtggaataatgttgataacagtgcttggcacctggaagtaggtggcagatgttaacgcccttcctcccttgcactgcgccccctgtgcctacctctagcattgtaacgaccacatagtattgaaatggccagtttacttgtctgccttcctttccaagaccgttggtgcctagaggactagaatcgtgtcctatttaactttgtgttcccaggtcctagctcaggagttggcaaataagaattaaatgtctgctacaccgaaacaaa

SEQ ID NO: 186 - DNA, 4190 bp, Homo sapiens
caacctccagccagtccctgggtcgggcggatcctcccagaggtggcacaatggagcgatctccaggagagggccccagccccagccccatggaccagccctctgctccctccgaccccactgaccagccccccgctgctcacgcaaagccagacccaggttctgggggccaacctgctggccctggcgcggcgggtgaggccctggcggtgctgacttcattcgggaggcggttgctggtgctgatacctgtgtatttggccggggcagtgggactcagcgtgggtttcgtgctcttcggcctcgccctctacctgggctggcgccgggtccgcgacgagaaagaacggagccttcgagcagcgaggcagctactggacgacgaggagcagctcactgcgaaaactctctatatgagtcatcgagagctacctgcctgggtcagcttcccagacgtggaaaaggctgaatggctcaataagattgtggcccaggtctggcccttcctgggccagtatatggagaagcttctggctgaaactgtggctccggctgttaggggatctaacccccatctgcaaacatttacatttacacgagtggaactgggtgaaaagccattgcgcatcattggagtcaaggttcacccaggtcagagaaaagagcagatcctgctggacttgaacatcagctatgtaggtgatgtgcagattgatgtggaagtgaagaaatatttttgcaaagcaggagtcaagggcatgcagctacatggcgttttgcgggtgatactggagccactcattggggaccttcccttcgtgggggctgtgtcaatgttcttcatccgacgcccgaccctagacatcaactggacagggatgaccaacctgctggatatcccaggacttagctcactctctgacaccatgatcatggactccattgctgccttcctcgtgttgcccaaccgattactggtgccccttgtgcctgaccttcaagatgtggctcagttgcgttcccctctgcccaggggcattattcgaattcacctgctggctgctcgagggctgagttccaaggacaaatatgtgaagggcctgattgagggcaagtcagacccatatgcacttgtgcgtttgggtacccagacattctgcagtcgtgtcattgatgaagaactcaacccacagtggggagagacttatgaggtgatggtacacgaggtcccagggcaggagattgaagtggaggtgttcgacaaggatccagataaagatgactttctgggcagaatgaagctggatgtagggaaggtgttacaggctagcgttctggatgattggttccctctacaaggtgggcaaggccaagttcacttgaggctagaatggctgtcacttttgtcagatgcagagaaactggagcaggttctacagtggaattggggagtctcctctcgaccagatcccccgtcagctgccatcttagttgtctacctggatcgggcccaggatcttcctctgaagaaggggaacaaggaacccaaccctatggtacaactgtcaattcaggatgtgactcaggagagcaaggctgtctacagtaccaactgcccagtgtgggaggaagcgttccggttcttcctacaagaccctcaaagccaggagctcgatgtgcaagtgaaggatgattccagggccctgactttaggagcactgacgctgcctctggcccgcctgctgactgccccagaactcatcctggaccagtggttccagctcagcagctctggtccaaactccagactctatatgaaactagtcatgaggatcctgtacttggattcatcagaaatatgcttccccacggtgcctggttgtcctggtgcttgggacgtggacagtgagaatccccagagaggcagcagtgtggatgccccacctcgaccctgtcacacgactcctgatagccagtttgggactgagcatgtgcttcggatccatgtattagaggcccaggacctgattgccaaagaccgtttcttggggggactggtgaagggcaagtcagacccctatgtcaaactaaagttggcaggacgaagcttccggagccatgttgttcgggaagatctcaatccccgctggaatgaggtttttgaggtgatcgtcacatcagttccaggccaagagctagaggttgaagtctttgacaaggacttggacaaggatgattttctgggcaggtgtaaagtgcgtctcaccacagtcttaaacagtggcttccttgatgagtggctgaccctggaggatgtcccatctggccgcctgcacttgcgcctggagcgtctcaccccccgtcccactgctgctgagttagaggaggtgctgcaggtgaatagtttgatccagactcagaagagtgcggagctggctgcggccctgctatccatctatatggagcgggcagaggacctcccgctgcgaaaaggcaccaagcacctcagcccttatgctactctcactgtgggagatagttctcataaaaccaagactatttcgcaaacttcagcccctgtctgggatgagagtgcctcctttctcatcaggaaaccacacactgagagcctagagttgcaggttcggggtgagggcactggcgtgctgggctcattatccctgcccctctcagagctcctcgtggctgaccagctctgcttggaccgctggtttacactcagcagtggtcaggggcaggtgctactgagagcacagctagggatcctggtgtcccagcactcgggagtggaagctcatagccacagctacagccacagctcctcatcgctgagtgaagaaccagagctctcggggggaccccctcacatcacctcctcagccccagagctccggcagcgcctaacacatgttgacagtccccttgaggctccagccgggcctctgggccaggtgaaactgactctgtggtactacagtgaagaacgaaagctggtcagcattgttcatggttgccggtcccttcgacagaatggacgtgatcctcctgatccctatgtgtcactgttgctactgccagacaagaaccgaggcaccaagaggaggacctcacagaagaagaggaccctgagtcctgaatttaatgaacggtttgagtgggaactccccctggatgaggcccagagacgaaagctggatgtctctgtcaagtctaattcctccttcatgtcaagagagcgtgagctgctggggaaggtgcagctggacctagctgagacagacctttcccagggtgtagcccggtggtatgacctgatggacaacaaggacaagggcagctcctaggagctggcgagtcccagcctgactgctctgtcttcctgccttcgtctcgctccatcaccgcctcaatgtgatgagcctaaagctagggtccaagggcagagcctgtgcccttcagccctttcacctaacaggcccatattcgggcctttgcctgaccaaagagaagaaccgtatgttccctttactgcacggcctttatccttctgggcccctggggcggggacctgagctggctgtttcctgctttgcctgcacattgttctcccttcctcccaactcctcagggccttctgtatctgtgcctggccagtggcagcactagcagtggtattagcttatgccaaatacagctttggaaggatctttttttctttaactagatggtcaccttcttccctaccacacatgggtgggaaggtggacaggctaacctctccagctgtgagcctcttagactactgcatgtagcaaatgttcagcagctcaggcccccatgtccagttctgtccccactgtcctcaaccctgtcctgaaaattctactgctttgatggctggggccagtctcttgtcactttggaaactgaggacgcgtggattctactcaagcctccaagtagtggcatatcagtcttggagctcctagctggtgatacggagagggctttggaggacttgggacagcagggccaatttttttgcccaagtgcctaggctgctaactcactgactagaacttaatctggtactttacagttttgcaccaactctgccaagccactggatcttacattaaacatcatactcaaaaaaaaaaaaaaaaaaa

SEQ ID NO: 187 - protein, 137 aa, Homo sapiens
QEDERIVLVDNKCKCARITSRIIRSSEDPNEDIVERNIRIIVPLNNRENISDPTSPLRTRFVYHLSDLCKKCDPTEVELDNQIVTATQSNICDEDSATETCYTYDRNKCYTAVVPLVYGGETKMVETALTPDACYPD

SEQ ID NO: 188 - DNA, 1418 bp, Homo sapiens
aactgtgcgaaccagacccggcagccttgctcagttcagcatagcggagcggatccgatcggatcggagcacaccggagcaggctcatcgagaaggcgtctgcgagaccatggagaacggatacacctatgaagattataagaacactgcagaatggcttctgtctcatactaagcaccgacctcaagttgcaataatctgtggttctggattaggaggtctgactgataaattaactcaggcccagatctttgactacagtgaaatccccaactttcctcgaagtacagtgccaggtcatgctggccgactggtgtttgggttcctgaatggcagggcctgtgtgatgatgcagggcaggttccacatgtatgaagggtacccactctggaaggtgacattcccagtgagggttttccaccttctgggtgtggacaccctggtagtcaccaatgcagcaggagggctgaaccccaagtttgaggttggagatatcatgctgatccgtgaccatatcaacctacctggtttcagtggtcagaaccctctcagagggcccaatgatgaaaggtttggagatcgtttccctgccatgtctgatgcctacgaccggactatgaggcagagggctctcagtacctggaaacaaatgggggagcaacgtgagctacaggaaggcacctatgtgatggtggcaggccccagctttgagactgtggcagaatgtcgtgtgctgcagaagctgggagcagacgctgttggcatgagtacagtaccagaagttatcgttgcacggcactgtggacttcgagtctttggcttctcactcatcactaacaaggtcatcatggattatgaaagcctggagaaggccaaccatgaagaagtcttagcagctggcaaacaagctgcacagaaattggaacagtttgtctccattcttatggccagcattccactccctgacaaagccagttgacctgccttggagtcgtctggcatctcccacacaagacccaagtagctgctaccttctttggccccttgctggagtcatgtgcctctgtccttaggttgtagcagaaaggaaaagattcctgtccttcacctttcccactttcttctaccagacccttctggtgccagatcctcttctcaaagctgggattacaggtgtgagcatagtgagaccttggcgctacaaaataaagctgttctcattcctgttctttcttacacaagagctggagcccgtgccctaccacacatctgtggagatgcccaggatttgactcgggccttagaactttgcatagcagctgctactagctctttgagataatacattccgaggggctcagttctgccttatctaaatcaccagagaccaaacaaggactaatccaatacctcttgga

SEQ ID NO: 189 - DNA, 1538 bp, Homo sapiens
atggatgggggaaccgggcggcgagacggcggcaggacggcggcaggatgtgtgaccggaatggtggtcggcggcttcgacagtggctgatcgagcagattgacagtagcatgtatccaggactgatttgggagaatgaggagaagagcatgttccggatcccttggaaacacgctggcaagcaagattataatcaggaagtggatgcctccatttttaaggcctgggcagtttttaaagggaagtttaaagaaggggacaaagctgaaccagccacttggaagacgaggttacgctgtgctttgaataagagcccagattttgaggaagtgacggaccggtcccaactggacatttccgagccatacaaagtttaccgaattgttcctgaggaagagcaaaaatgcaaactaggcgtggcaactgctggctgcgtgaatgaagttacagagatggagtgcggtcgctctgaaatcgacgagctgatcaaggagccttctgtggacgattacatggggatgatcaaaaggagcccttccccgccggaggcctgtcggagtcagctccttccagactggtgggcgcagcagcccagcacaggcgtgccgctggtgacggggtacaccacctacgacgcgcaccattcagcattctcccagatggtgatcagcttctactatgggggcaagctggtgggccaggccaccaccacctgccccgagggctgccgcctgtccctgagccagcctgggctgcccggcaccaagctgtatgggcccgagggcctggagctggtgcgcttcccgccggccgacgccatccccagcgagcgacagaggcaggtgacgcggaagctgttcgggcacctggagcgcggggtgctgctgcacagcagccggcagggcgtgttcgtcaagcggctgtgccagggccgcgtgttctgcagcggcaacgccgtggtgtgcaaaggcaggcccaacaagctggagcgtgatgaggtggtccaggtcttcgacaccagccagttcttccgagagctgcagcagttctataacagccagggccggcttcctgacggcagggtggtgctgtgctttggggaagagtttccggatatggcccccttgcgctccaaactcattctcgtgcagattgagcagctgtatgtccggcaactggcagaagaggctgggaagagctgtggagccggctctgtgatgcaggcccccgaggagccgccgccagaccaggtcttccggatgtttccagatatttgtgcctcacaccagagatcatttttcagagaaaaccaacagatcaccgtctaagtgcgtcgcttgggcgccccaccccgtctgcgtcctgcatccatctccctgttacagtggcccgcatcatgattaaagaatgtggatccctctgtctggggtgggatgccttactttgcacttaatttaataagggcattctcggaggagtagacgtttaatacgaagtggcgcatagccctgccgagatgtcggtgatggcctgatgcg

SEQ ID NO: 190 - DNA, 2885 bp, Homo sapiens
gcattcccccgcgcggagccgaagcagccgcaacgagccgggagctgagccgcgctgcgctgcggtgcgaagagccgggcggcggccagagccctccccgcgctgccagtgggacgcggagccagggatccccggctttgccccggggctggggtgcaacagactcttaacttggtcctcgcgccccgccaaccgcccccgggcaggaaacggccagaaccaccaccgcgccgcgctccacaaaagccccgggagttccaagacgggagggatcgggcgcgctccagaggcaggagggtcccccacaccctcaggctcatgcccagctcccccatcggacagcccccagccccatgaggaccctcaggcccggggcgagagcccggcacagcccggaccgaaattttgccgctgccttagagcgttagacaggatgtggctgggccgccgggccctgtgcgctctggtccttctgctcgcctgcgcctcgctggggctcctgtacgcgagcacccgggacgcgcccggcctccggctacctcttgcgccgtgggcgcccccgcaaagcccccgcaggcccgagctgccagatcttgctcctgagccccgctacgcacacatcccggtcaggatcaaggagcaagtagtggggctgctggcttggaacaactgcagttgtgagtccagtggggggggcctccccctccccttccagaaacaagtccgagctattgacctcaccaaggcctttgaccctgcagagctgagggctgcctctgccacaagagagcaggagttccaggcctttctgtcgaggagccagtccccagctgaccagctgctcatagcccctgccaactccccgctccagtaccccctacagggtgtggaagttcagcccctcaggagcatcttggtgccagggctgagccttcaggcagcttctggtcaggaggtataccaggtgaacctgactgcctccctaggcacctgggacgtggcaggggaagtgactggagttactctcactggagagggtcaggcagatctcacccttgtcagcccagggctggaccaactcaacaggcaactacaactggtcacttacagcagccgaagctaccagaccaacacagcagacacagtccggttctccaccgagggacatgaggctgctttcactatccgcataagacacccgcccaaccctcggctgtacccacctgggtctctaccccagggagcccagtacaacatcagcgctctagtcacgattgccaccaagaccttcctccgttatgatcggctacgggctctcatcaccagtatccgccgcttctacccaacggttaccgtggtcatcgctgacgacagcgacaagccagagcgcgttagtggcccctacgtggaacactatctcatgcccttcggcaagggctggttcgcaggccggaacctggccgtgtctcaagtaaccaccaagtacgtgctgtgggtggacgacgacttcgtcttcacggcgcggacgcggctggagaggcttgtggacgtgctggagcggacgccgctggacctggtggggggcgcggtgcgcgagatctccggctttgccaccacttatcggcagctgctgagcgtggagcccggcgccccaggcctcgggaactgcctccggcaaaggcgcggcttccaccacgagctcgtcggcttcccaggctgcgtggtcaccgacggcgtggttaacttcttcctggcgcggactgacaaggtgcgcgaggtcggtttcgacccccgcctcagccgcgtggctcatctggaattcttcttggatgggcttggttcccttcgggttggctcctgctccgacgtcgtggtggatcatgcatccaaactgaagctgccttggacatcaagggatgccggagcagagacttacgcccggtaccgttacccaggatcactggacgagagccagatggccaaacaccggctgctcttcttcaaacaccggctgcagtgcatgacctcccagtgatggcccgctggggatttctgactgtcaggctgggcctgcctccttgtccctgccaggaatttccaacaaaccccaccaccctgtgagcactctactggctgtccctgagcctctagttcctcactcttccttttcagaacctgatgcccagtaggggttgtcctggtgacacccctcctttttccagtgcccagaggcctggtggagccataacctctcccacagccagtgccaagtcctccccctgcccattctcatggggcaggaaatggggggatcactttccaagtgccaaagagcccagagggactctaagaacctaaggtggaaacactgtcctctcatcttgggaccgagggggtggggaagttccccaacacataatcccaagactgtgcccctcatctgcatcttcagatccagtactctgtgtacctgctccagccccacccccacagagagaacttgtggctctggggctggggtgagggctggtggttggtgaaagccattcttagttgtgtctctgcaatgctgtgggcacaaaagaaggggcaccagagtccctgtgcaaacacctagactcacttcatggattccaaagctctcagcttcattttattagttacgttaggtaagggggttcaagggtcatggtcctcatcacacacatgtcatcagggccctcctgcactccacatgatgaggtcagacccacacggtgcaaatctttgggtcagtgagctcctggagaagagaggagacatgtcaggaatagattaggcacccctcttccttaatgaaatgtggcagtcctctcaggggtaccccacctacttagggatctgag

SEQ ID NO: 191 - DNA, 1470 bp, Homo sapiens
agagccgccagcgaggctggggatgggggcgccgctgctctctcccggctggggagccggggctgccggccggcgctggtggatgctgctggcgcccctgctgccggcgctgctgctggtgcggcccgcgggggccctggtggaggggctctactgcggcacgcgggactgctacgaggtgctgggcgtgagccgctcggcgggcaaggcggagatcgcgcgggcctaccgccagctggcccggcgctaccaccctgaccgctaccggccccagcccggagacgagggccccgggcggacgccgcagagcgccgaggaggctttcctgctggtggcaaccgcctacgagacactcaaggtctctcaggcagctgcagagcttcaacagtactgtatgcagaatgcctgcaaggatgccctgctggtgggtgttccagctggaagtaaccccttccgggagcctagatcctgtgctttactctgaagactcgagagaagtttgctgaggaatgccttcaagcacaaagtgatgaatgactgccttcaagtctcaagaaaacacttttccctaacttttagagatatttcagccctttcctgtggcctggtcctatagccaaaatcacagatattcatgagtttctacttgagtgagaaaactgggtgaaggaatagaattttaaatagtaataactgcttgttttttttgtgcaagtacttttatacataagataaacaaaaaccttaccaccaaacataccaaaatgcacctctttcataagtgagttactaagatttctatacctggaatatcatgtatgtttcatttactggatgtttacattttaggaaggaaaatagttttgtttatttaaacaactgaatacttataaactgttgttcctggaagttatttattccataaaaaatttgttcttttgtcatgaatttataattcctaaatgaagaccagaaagtacaaattgctgggaggaagaataggctttattaatcaactgatgtcttgatttttctaaatgggaagattgctttatttttaacactaattatgggagcagattcttagcaaacttctttggaaaagttaatgttatgatgtgcattaggctgccccatcgtgtatataaatgaagcagatttgatttttgtattcttacgtttctctgctttgtagttgtggctgtacttaaagaaatacagaatttcatatatttaaaaatgtttaaaatgtgacccacagaacattgtaaatgattaaaaactaacatgaaaatattacaacctaaaagaattcttaacttcacaagtgttttacttcgacgatgtgcctttgatttaatttgggacacttttttagaaggatacattattcgtgtttgcaacggtctttgaagagcttggaaataaaatttctgcttaattaatcaaaaaaaaaaaaaaaaaaaaaaa

SEQ ID NO: 192 - DNA, 3075 bp, Homo sapiens
ggcactgtagcaccgctactccgtgccgcgcccgtcgagcattgcgttgctgcattgcgccccaccgactccactatgttgaagaaattcgacaagaaggatgaggagtcaggtggaggctccaacccattccagcaccttgagaagagtgcggtactccaggaggcccgtgtatttaatgaaactcccatcaaccctcggaaatgtgcccacatcctcaccaagattctttatctcataaaccagggggagcacctggggaccacggaagcgaccgaggccttctttgccatgaccaagctctttcagtccaatgaccccacactccgtcggatgtgctacttgaccatcaaggagatgtcttgcattgcagaggatgtcatcattgtcaccagcagcctaacaaaagacatgactgggaaagaagacaactaccggggcccggccgtgcgagccctctgccagatcactgatagcaccatgctgcaggctattgagcgctacatgaaacaagccattgtggacaaggtgcccagtgtctccagctctgccctcgtgtcttccttgcacctgctgaagtgcagctttgacgtggtcaagcgctgggtgaatgaggctcaggaggcagcatccagtgataacatcatggtccagtaccacgcactagggctcctgtaccatgtgcgtaagaatgaccgcctagccgtcaataagatgatcagcaaggtcacacggcatggccttaagtctccctttgcctactgcatgatgatccgggtggccagcaagcagctggaagaggaggatggcagccgtgacagcccactgtttgacttcatcgagagctgcttgcgcaacaagcacgagatggtggtgtatgaagccgcctcggccattgtcaacctgcctgggtgcagcgccaaggagctggccccagctgtctcagtgctccagctcttctgcagctcccccaaggccgccctccgttacgccgccgtccgcaccctcaacaaggtggccatgaagcacccgtccgctgtgacagcttgtaatctggatctggagaacctggtcacagattcaaaccgcagcattgccacgctggccatcaccaccctccttaagacgggcagcgagagcagcatcgaccgcctcatgaagcagatctcctccttcatgtcagaaatctcggatgaattcaaggtggtggttgtccaggccatcagtgccctgtgtcagaaatatcctcgcaaacacgccgtccttatgaacttcctgttcaccatgctgcgggaagagggtggctttgagtataagcgcgctatcgtggactgcatcatcagcatcattgaagagaactcagagagcaaggagacagggctgtcacatctgtgcgagttcatcgaggactgcgagttcacagtgctggccacccgtattctacatctcctgggccaggaggggcccaagaccaccaatccctcaaagtacatccgcttcatctataaccgagtggtcttggagcatgaggaggtccgggcaggtgctgtgagtgctctggcgaagtttggagcccagaatgaagagatgttacccagtatcttggtgttgctgaagaggtgtgtgatggatgatgacaatgaagtaagggaccgagccaccttctacctaaatgtcctggagcagaagcagaaggcccttaatgcaggctatatcctaaatggtctgactgtgtccatccctggtctggagagggctctgcagcagtacactctagaaccatcagaaaaaccttttgacctcaagtctgtgcccctggccacggcgcccatggcagagcagagaacagaaagtacccccatcacagcagtcaaacagcctgagaaagtggcagctaccaggcaggagatcttccaggagcagttggcagcagtgccagagttccgcggtcttgggcccctcttcaagtcctcgcctgagcccgtggccctcaccgagtcagagacggagtatgtcatccgctgcaccaaacacaccttcaccaaccacatggtttttcagtttgactgcacaaacacactcaatgaccagaccttggagaatgtcacagtgcagatggagcccactgaggcctatgaggtgctctgttacgtgcctgcccggagcctgccctacaaccagcccgggacctgctacacactggtggcactgcccaaagaagaccccacagctgtggcctgcacattcagctgcatgatgaagttcactgtcaaggactgtgatcccaccactggggagactgatgacgaaggctatgaggatgagtatgtgctggaagatctggaagttactgtagctgatcacattcaaaaggtcatgaaactgaacttcgaagcagcctgggatgaggtaggggatgaatttgagaaggaggaaacgttcaccttgtctaccatcaagacacttgaagaggctgtgggtaatattgtgaagttcttgggaatgcacccttgtgagaggtcagacaaagtgccggataacaagaacacccacacgttgctcctggctggtgtgttccggggtggtcatgacatcctggtgcgctcccggctgctgcttttggacacagtgacaatgcaggtgacagccagaagtttggaggagctgccagtagacatcatcttggcatctgtgggataagaggccagcctgcataggacctcatacccttccccaacactacctggaagttgtgccttcctcatgaaactggcagaaaccccttcccaagcttctgtattgaaaaacaattaggaatcattgcagatttttttttattctgctcccacctcccacccgggactacttgctggtgactttttttttttttttttttaaataggggatgattttagcttgtcctaaatcttgctgtccacccttccaggaaagggacattgtaaatgaataaaacattctcaactcctcttgaatctatcccccaagaaaccatcttatccctgtaataaatcagcatgtatttattgaaaaaaaaaaaaaaaaaaaaaaaaaaaa

SEQ ID NO: 193 - DNA, 1100 bp, Homo sapiens
ctaaagctgggttggtagctcctacctactgtgtggcaagaaggtatgggtcatgaacagaaccaaggagctgcgctgctacagatgttaccacttctgtggctgctaccccactcctgggccgtccctgaagctcctactccaatgtggccagatgacctgcaaaaccacacattcctgcacacagtgtactgccaggatgggagtcccagtgtgggactctctgaggcctacgacgaggaccagcttttcttcttcgacttttcccagaacactcgggtgcctcgcctgcccgaatttgctgactgggctcaggaacagggagatgctcctgccattttatttgacaaagagttctgcgagtggatgatccagcaaatagggccaaaacttgatgggaaaatcccggtgtccagagggtttcctatcgctgaagtgttcacgctgaagcccctggagtttggcaagcccaacactttggtctgttttgtcagtaatctcttcccacccatgctgacagtgaactggcagcatcattccgtccctgtggaaggatttgggcctacttttgtctcagctgtcgatggactcagcttccaggccttttcttacttaaacttcacaccagaaccttctgacattttctcctgcattgtgactcacgaaattgaccgctacacagcaattgcctattgggtaccccggaacgcactgccctcagatctgctggagaatgtgctgtgtggcgtggcctttggcctgggtgtgctgggcatcatcgtgggcattgttctcatcatctacttccggaagccttgctcaggtgactgattcttccagaccagagtttgatgccagcagcttcggccatccaaacagaggatgctcagatttctcacatcctgcccaggatctcctcttagggtagaagaagtctctgggacatccctggggtgtgtgtgtagatttcccacctggggactctgctgtccctgggcttgcatcccagggatcccagagtggcctgcctatcacaaccacatcccttccccccacaaggcaataaatctcatttctttaaaaaaaaaaaaaaaaaaaaa

SEQ ID NO: 194 - DNA, 1562 bp, Homo sapiens
ctggaattcggggcgccgagcaggagcagggaacaaaggagcggagaggggaggggagagagttgggcgagggagagcccccggccggctgccagaagatcctggcgggaggaagcccaagtgtcacttgaattccacccaaggagcgggcgcctgggatcagagcgtcctgtttagcaataacggctggagcacgtcctacaagttacgggagagtcggctgtgaaggagacgttcgcttatcccctgtgtccccgctcctggcccctccagacccccgccttgcctcgcgctgggaggggagatccagaatgaaaggcaagaaaggtattgttgcagcatctggcagtgagactgaggatgaggacagcatggacattcccttggacctttcttcatccgctggctcaggcaagagaaggagaaggggcaacctacccaaggagtctgtgcagattcttcgggattggctgtatgagcaccgttacaatgcctatccttcagagcaagaaaaagcgttgctgtcccagcaaacacacctgtctacgctacaggtctgtaactggttcatcaacgcccgccgcaggctcctccctgacatgctgagaaaggatggcaaagatccaaatcagttcacaatttcccgccgtggggccaagatttctgaaacgagctctgtggagtccgtgatgggcatcaaaaacttcatgccagctctagaggagaccccatttcattcctgtacagctgggccaaacccaaccctagggaggccactgtctcctaagccgtcatccccgggatcagttttggctcgtccatcagtgatctgccataccactgtgactgcattgaaagatgtccctttctctctctgccagtcggtcggtgtgggacaaaacacagatatacagcagatagcggccaaaaacttcacagacacctctctcatgtacccagaggacacttgtaaatctggaccaagtacgaatacacagagtggtcttttcaacactcctccccctactccaccggacctcaaccaggacttcagtggatttcagcttctagtggatgttgcactcaaacgggctgcagagatggagcttcaggcaaaacttacagcttaacccattttcaagcaaaacagttctcagaaatgtcatgattgccggggtgaaggcaagagatgaattgcattattttatatattttttattaatatttgcacatgggattgctaaaacagcttcctgttactgagatgtcttcaatggaatacagtcattccaagaactataaacttaaagctactgtagaaacaaagggttttcttttttaaatgtttcttggtagattattcataatgtgagatggttcccaatatcatgtgatttttttttttcctccccttccctttttttgttattttttcagactgtgcaatacttagagaacctatagcatcttctcattcccatgtggaacaggatgcccacatactgtctaattaataaattttccattttttttcaaacaagtaaaaaaaaaaaaaaaaaaaa

SEQ ID NO: 195 - DNA, 4050 bp, Homo sapiens
gaattcggcacgaggtcacccggataggtaaaggaaaacatgcctgccacacggaagccaatgagatatgggcatacagagggacacacggaggtctgttttgatgattctgggagttttattgtgacttgtggaagtgatggtgatgtgaggatttgggaagacttggatgatgatgatcctaagttcattaatgttggagaaaaggcatattcatgtgctttgaagagtggaaaactggtcactgcagtttctaataatactattcaagtccacacatttcctgaaggagttccagatggtatattgactcgcttcactacaaatgcaaaccatgtggtctttaatggggatggtactaaaattgctgctggatctagtgattttctagtcaaaattgtggatgtgatggatagcagccaacagaaaacatttcgaggacatgatgcccctgttttaagtctttcctttgatcctaaggacatctttctggcatcagctagttgtgatggatctgtcagagtgtggcaaatttcagatcagacatgtgctattagttggccactgctacaaaaatgcaacgatgtgataaatgcaaaatcaatctgcagacttgcttggcagccaaaaagtgggaagttactggcaattcctgtggaaaaatctgttaagctatatagaagagaatcttggagtcatcaatttgatctttcagataatttcatctctcagaccctcaatatagtaacctggtctccctgtgggcaatatttagctgcaggtagtattaatggtctaatcatagtttggaatgtggaaaccaaagactgcatggaaagggtgaaacatgagaaaggttatgcaatttgtggtctggcatggcatcctacttgtggtcgaatatcgtatactgatgcggaaggaaatctagggcttctagagaatgtttgtgaccccagtggaaagacatcaagcagtaaggtatctagcagagtggaaaaggattataatgatctttttgatggagatgatatgagtaatgctggtgattttctaaatgacaatgcagttgagatcccttctttttcaaaagggattataaatgatgatgaggatgatgaagacctcatgatggcttcaggtcgtcctagacagcgaagtcacatcctagaagatgatgaaaactcagttgatatttcaatgctaaaaactggttctagtcttctcaaagaggaggaggaagatggtcaagaaggcagcattcacaatctaccacttgtaacatcccaaaggccattttatgatggacccatgccaactccccggcaaaagccatttcagtcaggttctacaccgttgcatctcactcacagattcatggtgtggaactctattggaattattcgctgctataatgatgagcaagacaatgccatagatgtggagttccatgatacctccatacaccatgcaacacacttatcaaacactttgaattatacaatagcagatctttcccacgaagctattttgttggcatgtgaaagcactgatgaactagcaagcaagcttcactgcctgcactttagttcttgggattcaagcaaagagtggataatagacttgcctcagaatgaggatattgaagccatatgtctcggtcaaggatgggctgctgccgctactagtgccctgcttcttcgattgtttactattggaggggttcaaaaagaggtattcagccttgctggacctgtggtgtcaatggcaggacatggagaacagcttttcattgtttatcacagaggtacaggatttgatggggatcagtgccttggagttcaactgctagagctggggaaaaagaaaaaacaaattttgcatggtgaccctcttcctcttacaaggaaatcctaccttgcatggattgggttttcagctgaaggtaccccttgttacgtggattcagaaggaattgttcgaatgcttaacagaggacttggtaatacgtggactcctatatgtaatacaagagagcactgcaaaggaaaatctgatcactactgggtggttggtatccatgaaaatccccagcaactaaggtgcattccttgtaaaggttctcggtttcccccaacccttccacgccctgctgttgctatattatcctttaagcttccttactgtcagattgcaacagagaaaggacaaatggaggagcaattttggcgttcagttatatttcacaaccaccttgattatttagctaaaaatggttatgaatatgaagagagcactaaaaatcaagcaacaaaagagcaacaggaacttttaatgaaaatgcttgcgctttcttgtaaactggagcgagaattccgttgtgtggaacttgctgatctaatgactcaaaatgctgtgaatttagccattaaatatgcttctcgctctcggaaattaatactggctcaaaaactaagtgaactggctgtagagaaggcagccgaattgacagcaacccaggtggaagaggaagaagaagaagaagatttcagaaaaaagctgaatgctggttacagcaatactgctacagagtggagccaaccaaggttcagaaatcaagttgaagaagatgctgaggacagtggagaagctgatgatgaagaaaaaccagaaatacataagcctggacagaactcgttttccaaaagtacaaattcctctgatgtttcagctaagtcaggtgcagttacctttagcagccaaggacgagtaaatccctttaaggtatcagccagttccaaagaaccagccatgtcaatgaattcagcacgttcaactaatattttagacaatatgggcaaatcatccaagaaatccactgcacttagtcgaactacaaataatgaaaagtctcccattataaagcctctgattccaaagccgaagcctaagcaggcatctgcagcatcctatttccagaaaagaaattctcaaactaataaaactgaggaagtgaaagaagaaaatcttaaaaatgtattatctgaaaccccagctatatgtcctcctcaaaacactgaaaaccaaaggccaaagaccgggttccagatgtggttagaagaaaatagaagtaatattttgtctgacaatcctgacttttcagatgaagcagacataataaaagaaggaatgattcgatttagagtattgtcaactgaagaaagaaaggtgtgggctaacaaagccaaaggagaaacggcaagtgaaggaactgaagcaaagaagcgaaaacgtgtggttgatgaaagtgatgaaacagaaaaccaggaagaaaaagcaaaagagaacctgaatttgtctaaaaagcagaaacctttagatttttctacaaatcagaaactatcagcttttgcatttaagcaggagtaaaggaagaaagtgaccctagggaagtaatggattttttttactcatctttgaatatagactcgagtctttgggaaactcattatatatatattttttaaagagtttgaagcaactgtttgtctttataagataatgtagtaattatattggtgtaggtaacaggacatatgtaaaaactatcatctttgcagattactctgcctccaaatgcagggcctttcagagatgcattgtgattgtaattactgagttgaagctccaaccaatttgaatttgtttcttaaccttgaaaaatcattaaagccaaggtattaaaacctttgtgcattaataccttctaggggtttggttcatttggtttttgtcatgtgcaaggaaggacaatagtcctctttccaagtgtgttagcatagacttctctatatgtttctactagacctaggggatgacgtcttttaataatactggccctaaacatgtaaataatcttgtaggtgagactttttcttttgtgtttcggaaatttcctatgtggctttcagttgtctgtttgtatagcctggatttttttgaggtaaatgaaactttctcatttgtaaaaaaaaaaaaaaaaaactcgag

SEQ ID NO: 196 - DNA, 3091 bp, Homo sapiens
gggagacccaagcttctagagatccctcgacctcgagatccattgtgctctaaagagcggaccccagcctctgccaggttcggtccgccatcctcgtcccgtcctccgccggcccctgccccgcgcccagggatcctccagctcctttcgcccgcgccctccgttcgctccggacaccatggacaagttttggtggcacgcagcctggggactctgcctcgtgccgctgagcctggcgcagatcgatttgaatataacctgccgctttgcaggtgtattccacgtggagaaaaatggtcgctacagcatctctcggacggaggccgctgacctctgcaaggctttcaatagcaccttgcccacaatggcccagatggagaaagctctgagcatcggatttgagacctgcaggtatgggttcatagaagggcatgtggtgattccccggatccaccccaactccatctgtgcagcaaacaacacaggggtgtacatcctcacatacaacacctcccagtatgacacatattgcttcaatgcttcagctccacctgaagaagattgtacatcagtcacagacctgcccaatgcctttgatggaccaattaccataactattgttaaccgtgatggcacccgctatgtccagaaaggagaatacagaacgaatcctgaagacatctaccccagcaaccctactgatgatgacgtgagcagcggctcctccagtgaaaggagcagcacttcaggaggttacatcttttacaccttttctactgtacaccccatcccagacgaagacagtccctggatcaccgacagcacagacagaatccctgctaccactttgatgagcactagtgctacagcaactgagacagcaaccaagaggcaagaagcctgggattggttttcatggttgtttctaccatcagagtcaaagaatcatcttcacacaacaacacaaatggctggtacgtcttcaaataccatctcagcaggctgggagccaaatgaagaaaatgaagatgaaagagacagacacctcagtttttctggatcaggcattgatgatgatgaagattttatctccagcaccatttcaaccacaccacgggcctttgaccacacaaaacagaaccaggactggacccagtggaacccaagccattcaaatccggaagtgctacttcagacaaccacaaggatgactgatgtagacagaaatggcaccactgcttatgaaggaaactggaacccagaagcacaccctcccctcattcaccatgagcatcatgaggaagaagagaccccacattctacaagcacaatccaggcaactcctagtagtacaacggaagaaacagctacccagaaggaacagtggtttggcaacagatggcatgagggatatcgccaaacacccagagaagactcccattcgacaacagggacagctgcagcctcagctcataccagccatccaatgcaaggaaggacaacaccaagcccagaggacagttcctggactgatttcttcaacccaatctcacaccccatgggacgaggtcatcaagcaggaagaaggatggatatggactccagtcatagtacaacgcttcagcctactgcaaatccaaacacaggtttggtggaaaatttggacaggacaggacctctttcaatgacaacgcagcagagtaattctcagagcttctctacatcacatgaaggcttggaagaagataaagaccatccaacaacttctactctgacatcaagcaataggaatgatgtcacaggtggaagaagagacccaaatcattctgaaggctcaactactttactggaaggttatacctctcattacccacacacgaaggaaagcaggaccttcatcccagtgacctcagctaagactgggtcctttggagttactgcagttactgttggagattccaactctaatgtcaatcgttccttatcaggagaccaagacacattccaccccagtggggggtcccataccactcatggatctgaatcagatggacactcacatgggagtcaagaaggtggagcaaacacaacctctggtcctataaggacaccccaaattccagaatggctgatcatcttggcatccctcttggccttggctttgattcttgcagtttgcattgcagtcaacagtcgaagaaggtgtgggcagaagaaaaagctagtgatcaacagtggcaatggagctgtggaggacagaaagccaagtggactcaacggagaggccagcaagtctcaggaaatggtgcatttggtgaacaaggagtcgtcagaaactccagaccagtttatgacagctgatgagacaaggaacctgcagaatgtggacatgaagattggggtgtaacacctacaccattatcttggaaagaaacaaccgttggaaacataaccattacagggagctgggacacttaacagatgcaatgtgctactgattgtttcattgcgaatcttttttagcataaaattttctactctttttgttttttgtgttttgttctttaaagtcaggtccaatttgtaaaaacagcattgctttgtaaattagggcccaattaataatcagcaagaatttgatcgttcagttccacttggaggccttcatcctcgggtgtgctatggatggcttctaacaaaaactacacatatgtattcctgatcgccaacctttcccccaccagctaaggacatttcccagggttaatagggcctggtccctgggaggaaatttgaatgggtccattttgcccttccatagcctaatccctgggcattgctttccactgaggttggggtgtactagttacacatcttcaacagaccccctctagaaatttttcagatgcttctgggagacaccaaagggtgaagctatttatctgtagtaaactatttatctgtgtttttgaaatattaaaccctggatcagtcctttgatcagtataattttttaaagttactttgtcagaggcacaaaagggtttaaactgattcataataaatatctgtacttcttcgatcttcaaaa

SEQ ID NO: 197 - DNA, 2016 bp, Homo sapiens
atgcaaccagacatgtccttgaatgtcattaagatgaaatccagtgacttcctggagagtgcagaactggacagcggaggctttgggaaggtgtctctgtgtttccacagaacccagggactcatgatcatgaaaacagtgtacaaggggcccaactgcattgagcacaacgaggccctcttggaggaggcgaagatgatgaacagactgagacacagccgggtggtgaagctcctgggcgtcatcatagaggaagggaagtactccctggtgatggagtacatggagaagggcaacctgatgcacgtgctgaaagccgagatgagtactccgctttctgtaaaaggaaggataattttggaaatcattgaaggaatgtgctacttacatggaaaaggcgtgatacacaaggacctgaagcctgaaaatatccttgttgataatgacttccacattaagatcgcagacctcggccttgcctcctttaagatgtggagcaaactgaataatgaagagcacaatgagctgagggaagtggacggcaccgctaagaagaatggcggcaccctctactacatggcgcccgagcacctgaatgacgtcaacgcaaagcccacagagaagtcggatgtgtacagctttgctgtagtactctgggcgatatttgcaaataaggagccatatgaaaatgctatctgtgagcagcagttgataatgtgcataaaatctgggaacaggccagatgtggatgacatcactgagtactgcccaagagaaattatcagtctcatgaagctctgctgggaagcgaatccggaagctcggccgacatttcctggcattgaagaaaaatttaggcctttttatttaagtcaattagaagaaagtgtagaagaggacgtgaagagtttaaagaaagagtattcaaacgaaaatgcagttgtgaagagaatgcagtctcttcaacttgattgtgtggcagtaccttcaagccggtcaaattcagccacagaacagcctggttcactgcacagttcccagggacttgggatgggtcctgtggaggagtcctggtttgctccttccctggagcacccacaagaagagaatgagcccagcctgcagagtaaactccaagacgaagccaactaccatctttatggcagccgcatggacaggcagacgaaacagcagcccagacagaatgtggcttacaacagagaggaggaaaggagacgcagggtctcccatgacccttttgcacagcaaagaccttacgagaattttcagaatacagagggaaaaggcactgtttattccagtgcagccagtcatggtaatgcagtgcaccagccctcagggctcaccagccaacctcaagtactgtatcagaacaatggattatatagctcacatggctttggaacaagaccactggatccaggaacagcaggtcccagagtttggtacaggccaattccaagtcatatgcctagtctgcataatatcccagtgcctgagaccaactatctaggaaatacacccaccatgccattcagctccttgccaccaacagatgaatctataaaatataccatatacaatagtactggcattcagattggagcctacaattatatggagattggtgggacgagttcatcactactagacagcacaaatacgaacttcaaagaagagccagctgctaagtaccaagctatctttgataataccactagtctgacggataaacacctggacccaatcagggaaaatctgggaaagcactggaaaaactgtgcccgtaaactgggcttcacacagtctcagattgatgaaattgaccatgactatgagcgagatggactgaaagaaaaggtttaccagatgctccaaaagtgggtgatgagggaaggcataaagggagccacggtggggaagctggcccaggcgctccaccagtgttccaggatcgaccttctgagcagcttgatttacgtcagccagaactaa

SEQ ID NO: 198 - DNA, 1126 bp, Homo sapiens
gttctgcggtgctggtatttagagcgcagcggctgacgggccggatcgccttcgccgccgcccgcccgcaaaccttcgtgcccggcccgtcctcgcccccgcctccgccaccgcctcggcccgcagagcttgccccctccccacccgcagacatgtccgagtccaagagcggccccgagtatgcttcgtttttcgccgtcatgggcgcctcggccgccatggtcttcagcgccctgggcgctgcctatggcacagccaagagcggtaccggcattgcggccatgtctgtcatgcggccggagcagatcatgaagtccatcatcccagtggtcatggctggcatcatcgccatctacggcctggtggtggcagtcctcatcgccaactccctgaatgacgacatcagcctctacaagagcttcctccagctgggcgccggcctgagcgtgggcctgagcggcctggcagccggctttgccatcggcatcgtgggggacgctggcgtgcggggcaccgcccagcagccccgactattcgtgggcatgatcctgattctcatcttcgccgaggtgctcggcctctacggtctcatcgtcgccctcatcctctccacaaagtagaccctctccgagcccaccagccacagaatattatgtaaagaccacccctcctcattccagaacgaacagcctgacacatacgcacggggccgccgcccccagtagttggtcttgtacatgcgcagtgtcctagtgcccatcgtctgtttccccggccttgcccccgcccgccccgtgccgtggacatctgggcccactcatcgcccctccaggcccccggcgccccaccccctagagtgctctgtgtatgcggatgatttagaattgtcatttctctttactggatgtttatttataaagatctggcctgttcctgcgtctgcggagcggcccttgtctcccagctatctataaccttagctagagtgtcgccttgtgggttcctgttgctgagacttcctggatggagccgccctcaccgccgggcccgtggccctgcgcggagctgtgtccaataaagttcttggatgtgaaaaaaaaaaaaaaaaaaaaaaaaaaaaaaaaaa

SEQ ID NO: 199 - DNA, 1682 bp, Homo sapiens
cagcggcacagcgaggtcggcagcggcacagcgaggtcggcagcggcacagcgaggtcggcagcggcacagcgaggtcggcagcggcacagcgaggtcggcagcggcacagcgaggtcggcagcggcagcgaggtcggcagcggcacagcgaggtcggcagcggcagcgaggtcggcagcggcgcgcgctgtgctcttccgcggactctgaatcatggcgaccacggccacgatggcgacctcgggctcggcgcgaaagcggctgctcaaagaggaagacatgactaaagtggaattcgagaccagcgaggaggtggatgtgacccccacgttcgacaccatgggcctgcgggaggacctgctgcggggcatctacgcttacggttttgaaaaaccatcagcaatccagcaacgagcaatcaagcagatcatcaaagggagagatgtcatcgcacagtctcagtccggcacaggaaaaacagccaccttcagtatctcagtcctccagtgtttggatattcaggttcgtgaaactcaagctttgatcttggctcccacaagagagttggctgtgcagatccagaaggggctgcttgctctcggtgactacatgaatgtccagtgccatgcctgcattggaggcaccaatgttggcgaggacatcaggaagctggattacggacagcatgttgtcgcgggcactccagggcgtgtttttgatatgattcgtcgcagaagcctaaggacacgtgctatcaaaatgttggttttggatgaagctgatgaaatgttgaataaaggtttcaaagagcagatttacgatgtatacaggtacctgcctccagccacacaggtggttctcatcagtgccacgctgccacacgagattctggagatgaccaacaagttcatgaccgacccaatccgcatcttggtgaaacgtgatgaattgactctggaaggcatcaagcaatttttcgtggcagtggagagggaagagtggaaatttgacactctgtgtgacctctacgacacactgaccatcactcaggcggtcatcttctgcaacaccaaaagaaaggtggactggctgacggagaaaatgagggaagccaacttcactgtatcctcaatgcatggagacatgccccagaaagagcgggagtccatcatgaaggagttccggtcgggcgccagccgagtgcttatttctacagatgtctgggccagggggttggatgtccctcaggtgtccctcatcattaactatgatctccctaataacagagaattgtacatacacagaattgggagatcaggtcgatacggccggaagggtgtggccattaactttgtaaagaatgacgacatccgcatcctcagagatatcgagcagtactattccactcagattgatgagatgccgatgaacgttgctgatcttatctgaagcagcagatcagtgggatgagggagactgttcacctgctgtgtactcctgtttggaagtatttagatccagattctacttaatggggtttatatggactttcttctcataaatggcctgccgtctcccttcctttgaagaggatatggggattctgctctcttttcttatttacatgtaaataatacattgttctaagtctttttcattaaaaatttaaaacttttcccat

SEQ ID NO: 200 - DNA, 3480 bp, Homo sapiens
ggcggagatcgcgtctctttcgctccgtgtccgctgctgctcctgtgagcgcccggcgagtccgtcccgtccaccgtccgcagctggtagccagcctgcccctcgcctcgactccctttcaccaacaccgacacccacattgacacctccagtccggccagccgctccactcgttgcctttgcatctccacacatggcgtcctcgcgcagagcggcggctcctccgggggacccgcggtccccaccgtgcagcggggcatcatcaagatggtcctctcagggtgcgccatcattgtccgaggtcagcctcgtggtgggcctcctcctgagcggcagatcaacctcagcaacattcgtgctggaaatcttgctcgccgggcagccgccacacaacctgatgcaaaggatacccctgatgagccctgggcatttccagctcgagagttccttcgaaagaagctgattgggaaggaagtctgtttcacgatagaaaacaagactccccaggggcgagagtatggcatgatctaccttggaaaagataccaatggggaaaacattgcagaatcactggttgcagagggcttagccacccggagagaaggcatgagagctaataatcctgagcagaaccggctttcagaatgtgaagaacaagcaaaggcagccaagaaagggatgtggagtgaggggaacggttcacatactatccgggatctcaagtataccattgaaaacccaaggcactttgtggactcacaccaccagaagcctgttaatgctatcatcgagcatgtgcgggacggcagtgtggtcagggccctgctcctcccagattactacctggttacagtcatgctgtcaggcatcaagtgcccaacttttcgacgggaagcagatggcagtgaaactccagagccttttgctgcagaagccaaatttttcactgagtcgcgactgcttcagagagatgttcagatcattctggagagctgccacaaccagaacattgtgggtaccatccttcatccaaatggcaacatcacagagctcctcctgaaggaaggtttcgcacgctgtgtggactggtcgattgcagtttacacccggggcgcagaaaagctgagggcggcagagaggtttgccaaagagcgcaggctgagaatatggagagactatgtggctcccacagctaatttggaccaaaaggacaagcagtttgttgccaaggtgatgcaggttctgaatgctgatgccattgttgtgaagctgaactcaggcgattacaagacgattcacctgtccagcatccgaccaccgaggctggagggggagaacacccaggataagaacaagaaactgcgtcccctgtatgacattccttacatgtttgaggcccgggaatttcttcgaaaaaagcttattgggaagaaggtcaatgtgacggtggactacattagaccagccagcccagccacagagacagtgcctgccttttcagagcgtacctgtgccactgtcaccattggaggaataaacattgctgaggctcttgtcagcaaaggtctagccacagtgatcagataccggcaggatgatgaccagagatcatcacactacgatgaactgcttgctgcagaggccagagctattaagaatggcaaaggattgcatagcaagaaggaagtgcctatccaccgtgttgcagatatatctggggatacccaaaaagcaaagcagttcctgccttttcttcagcgggcaggtcgttctgaagctgtggtggaatacgtcttcagtggttctcgtctcaaactctatttgccaaaggaaacttgccttatcaccttcttgcttgcaggcattgaatgccccagaggagcccgaaacctcccaggcttggtgcaggaaggagagcccttcagcgaggaagctacacttttcaccaaggaactggtgctgcagcgagaggtggaggtggaggtggagagcatggacaaggccggcaactttatcggctggctgcacatcgacggtgccaacctgtccgtcctgctggtggagcacgcgctctccaaggtccacttcaccgccgaacgcagctcctactacaagtccctgctgtctgccgaggaggccgcaaagcagaagaaagagaaggtctgggcccactatgaggagcagcccgtggaggaggtgatgccagtgctggaggagaaggagcgatctgctagctacaagcccgtgtttgtgaccgagatcactgatgacctgcacttctacgtgcaggatgtggagaccggcacccagttccagaagctgatggagaacatgcgcaatgacattgccagtcacccccctgtagagggctcctatgccccccgcaggggagagttctgcattgccaaatttgtagatggagaatggtaccgtgcccgagtagagaaagtcgagtctcctgccaaaatacatgtcttctacattgactacggcaacagagaggtcctgccatccacccgcctgggtaccctatcacctgccttcagcactcgggtgctgccagctcaagccacggagtatgccttcgccttcatccaggtgccccaagatgatgatgcccgcacggacgccgtggacagcgtagttcgggatatccagaacactcagtgcctgctcaacgtggaacacctgagtgccggctgcccccatgtcaccctgcagtttgcagattccaagggcgatgtggggctgggcttggtgaaggaagggctggtcatggtggaggtgcgcaaggagaaacagttccagaaagtgatcacagaatacctgaatgcccaagagtcagccaagagcgccaggctgaacctgtggcgctatggagactttcgagctgatgatgcagacgaatttggctacagccgctaaggaggggatcgggtttggcccccagcccccgtcacgccagtccctcttcctctgccgggagggtgttttcaactccaaaccccagagaggggttgtacattgggtccagctttgcttcagtgtgtggaaatgtctcgtggggtggcatcggggctgcggggtggggaccccaaggctttctggggcagacccttgtcctctgggatgatgggcactgctatccacagtctctgccagttggttttatttggaggtttgtgggcttttttaaaaaaaaaaaagtcctcaaatcaggaagaaacatcaaagactatgtcctagtggagggagtaatcctaacacccaggctggccgccagctggcacctgcctctatcccagactgccctcgtcccagctctctgtccaactgttgattatgtgatttttctgatacgtccattctcaaatgccagtgtgttcacatcttcgctctggccagcccattctgtatttaaagctttttgaggcccaataaaatagtacgtgctgctgcagcccttattgatcaaaaaaa

SEQ ID NO: 201 - DNA, 1918 bp, Homo sapiens; identical to SEQ ID NO: 121

SEQ ID NO: 202 - DNA, 3812 bp, Homo sapiens
tttccttttccttctctcctgagcgctcctgcagttcctggggcgtagtaggggatccacaagcgtttgtgaccagtgaagttctttacaagggtgagatctgcacgggaggacccgagcgagggtctcggcttgccaggaagccggggttccccgggaagcgtggagttcacccgcgcactcgaagtgcctttgcaaaattatatctgggtgttggcacccagccactattctgccaatgaagtacatcctggtcacgggtggggtcatctcaggcattggtaaagggatcattgccagcagcattggaacgattctaaaatcatgtggactccgagttactgccataaaaatcgacccctatattaacatcgatgctggcactttttcaccttatgaacacggtgaagtcttcgtcttaaatgatggtggagaagttgatttagaccttggaaattatgaaagatttttggatattaatctttataaagacaacaatatcaccacggggaagatatatcagcatgtgatcaataaagagaggcgtggtgattacctggggaaaacagtgcaagttgtccctcacattactgatgctgtccaggagtgggttatgaatcaagccaaggtgccggtggatggtaataaggaagagccccaaatatgcgttattgagctgggaggcaccattggagacatcgaaggaatgccgtttgtggaggcgtttagacaattccagtttaaggcgaaaagagagaatttctgtaatatccacgttagccttgtcccacagctcagtgctaccggagaacaaaaaaccaaacccacccaaaacagcgtccgcgcactgaggggtttaggcctgtctccagatctgattgtctgccgaagttcatcgcccattgagatggccgtgaaggagaagatttctatgttttgtcacgtgaaccctgaacaggtcatatgtatccatgatgtttcttccacataccgagttcctgtgcttttagaggaacaaagcattgtgaaatattttaaggagagattgcacctgcccatcggtgattctgcaagtaatttgctttttaagtggagaaatatggctgacaggtatgaaaggttacagaaaatatgctccatagccctggttggcaaatacaccaagctcagagactgctacgcctctgtgttcaaagccctggaacactcagccctggccatcaaccacaagttgaatctgatgtacatagactccattgatctggagaagatcactgaaaccgaggaccctgtgaaatttcatgaagcttggcagaagctatgcaaagctgatggtattcttgtgcctggaggctttggaatcagaggaacattgggaaaactccaggcgatttcttgggcaaggacaaagaagattccttttctgggagtttgtcttgggatgcaactagcagtgatagagtttgcaagaaactgccttaacttgaaagatgctgattccacagagtttaggccaaatgccccagttcctctggtgattgatatgcccgagcacaaccctggcaatttgggaggaacaatgagactgggaataagaagaactgttttcaaaactgaaaattcaatattaaggaaactttatggtgatgttccttttatagaagaaagacacagacatcggttcgaggtaaaccctaacctgatcaaacaatttgagcagaatgacttaagttttgtaggtcaggatgtcgatggagacaggatggaaatcattgaactggcaaatcatccttattttgttggtgtccagttccatcctgagttttcttctaggccgatgaagccttcccctccgtatctggggctgttacttgcagcaactgggaacctgaatgcctacttgcaacagggttgcaaactgtcttccagtgatagatacagtgatgccagtgatgacagcttttcagagccaaggatagctgagttggaaataagctgaaatgaatacatgactgggaataatggggactgcctgtgaggcctctgaaataattgaaggcaagatgaaggaactatctgaagaaatcactacactcttagagaatccctctgttctccagcaaacatgggatgtaaagcctcacagggaatctgataatacatacttctgtcaaccagaaccagaggggtagttttcttttccctccagaggcagcctttggtacttaaaatatctgtagctgattaaatttttcccaacaacctcactggggagaaagtgtgttcatgttttgtccagcggatcaggatgttaggatgacgagcaagagtccaggtcactgtgcctttgctgtgttgtatggaaaggatggcagggaacatgctgtaagtaattttgagtaagaaaatgagtcactgtgttacctggaactcagccacagatttgtgtgtggtccaagatcattgcagtttctcaccctgtttatttcctggtaaaagtaaaattgaataggtccaagacttgggggtggcaagtaaggctttgcctcaggcacaaaatttaagggggctccaaaaaactcaggaatcaagatcagcaatacagtctgagtatcccttatgtgaaatgcttggggctagaagtgttttgaatttcagattttggaatatttgcatatacatgcgatatcttggggatgagactcaagactaaacatgaaattcatttatgcttcatatacaccttatatacatagcctaaaggtaatttgatacaatattttaaataattttgtgcatgaaacaaagtttcgactgcattttgactgtgatttctggcatgagatcagttatggaattttccacttctagcgtcatgttggcattcagaaattttgaaattttggagcattttggattttcagattagggatgctcaacctgtatatatattttttaatcgacgtgaaattcacgtaacatagaattaaccattttgaagtgaacaatttggttgcattcactgatgttgagcaaccaccacctttaactatttccaaaacattttcatcactccaaaataaatgcctgtacacactagcagtcactccctatcttcccctccacctgtccgctggcaaccactgatctcctttttatttctgtggctttttctattctggatatttcatataagtggaattacacaatatatgtggtcttttgtgtctggcttcttctgagacagtaggaagggggcttggctttggctcacccccactagagcattttttcatgcattcccactgatcacaaaacccatactactacctcattgacaccatacctgctaacctcgaggctttagtcatacaaagaagatggcctttctgtattgttcttctgtgctctcataatgcttaaccatgtcttttacttaaacaattccaggaactggccttaggagatccaaatagggaaccaagattgcagagtgtcccatcttgggagggaatgctgaataattaattgatttacagccttgttgccgctggccagaccaccaggtggcccattactcgagatgatcatcacaaccagatgatgctaacctatatcctctacccttcgcgtgctttgtctgggaagtcttttggccccatgtcagtttctattgcattgagagcccaagagcccctggtcagtcaggcttccatttagcatggcgtttgcaaggtttacccatgttgtagcatgtgtcagaatttcattcctttctatggctgaataaaattccattgtatgaatatacc

SEQ ID NO: 203 - DNA, 502 bp, Homo sapiens
ctgtcgccctgcacggtgacccgcgtgtgcgaggccttcatggccaggatccgggtggagaggcgctgctgacaccgccgccacaccgccgccacaccgccgctgcctcagtcatgccgaagcacgagttctctgtggacatgacctgtggaggctgtgctgaagctgtctctcgggtcctcaataagcttggaggagttaagtatgacattgacctgcccaacaagaaggtctgcattgaatctgagcacagcatggacactctgcttgcaaccctgaagaaaacaggaaagactgtttcctaccttggccttgagtagcaggggcctggtccccacagcccacaggatggaccaaagggggcaggatgctgatcctcccgctggcttccagacagacctgggacttggcagtcatgccgggtgatcgtgttcctgcggagaccctcagttgtcctattccttcctagcttccctgcaataaatcaagctgcttttgttgg

SEQ ID NO: 204 - DNA, 7042 bp, Homo sapiens
aagaagaggtagcgagtggacgtgactgctctatcccgggcaaaagggatagaaccagaggtggggagtctgggcagtcggcgacccgcgaagacttgaggtgccgcagcggcatccggagtagcgccgggctccctccggggtgcagccgccgtcgggggaagggcgccacaggccgggaagacctcctccctttgtgtccagtagtggggtccaccggagggcggcccgtgggccgggcctcaccgcggcgctccgggactgtggggtcaggctgcgttgggtggacgcccacctcgccaaccttcggaggtccctgggggtcttcgtgcgccccggggctgcagagatccaggggaggcgcctgtgaggcccggacctgccccggggcgaagggtatgtggcgagacagagccctgcacccctaattcccggtggaaaactcctgttgccgtttccctccaccggcctggagtctcccagtcttgtcccggcagtgccgccctccccactaagacctaggcgcaaaggcttggctcatggttgacagctcagagagagaaagatctgagggaagatggatgcaaaagctcgaaattgtttgcttcaacatagagaagctctggaaaaggacatcaagacatcctacatcatggatcacatgattagtgatggatttttaacaatatcagaagaggaaaaagtaagaaatgagcccactcaacagcaaagagcagctatgctgattaaaatgatacttaaaaaagataatgattcctacgtatcattctacaatgctctactacatgaaggatataaagatcttgctgcccttctccatgatggcattcctgttgtctcttcttccagtgtaaggacagtcctgtgtgaaggtggagtaccacagaggccagttgtttttgtcacaaggaagaagctggtgaatgcaattcagcagaagctctccaaattgaaaggtgaaccaggatgggtcaccatacatggaatggcaggctgtgggaagtctgtattagctgcagaagctgttagagatcattcccttttagaaggttgtttcccagggggagtgcattgggtttcagttgggaaacaagacaaatctgggcttctgatgaaactgcagaatctttgcacacggttggatcaggatgagagtttttcccagaggcttccacttaatattgaagaggctaaagaccgtctccgcattctgatgcttcgcaaacacccaaggtctctcttgatcttggatgatgtttgggactcttgggtgttgaaagcttttgacagtcagtgtcagattcttcttacaaccagagacaagagtgttacagattcagtaatgggtcctaaatatgtagtccctgtggagagttccttaggaaaggaaaaaggacttgaaattttatccctttttgttaatatgaagaaggcagatttgccagaacaagctcatagtattataaaagaatgtaaaggctctccccttgtagtatctttaattggtgcacttttacgtgattttcccaatcgctgggagtactacctcaaacagcttcagaataagcagtttaagagaataaggaaatcttcgtcttatgattatgaggctctagatgaagccatgtctataagtgttgaaatgctcagagaagacatcaaagattattacacagatctttccatccttcagaaggacgttaaggtgcctacaaaggtgttatgtattctctgggacatggaaactgaagaagttgaagacatactgcaggagtttgtaaataagtctcttttattctgtgatcggaatggaaagtcgtttcgttattatttacatgatcttcaagtagattttcttacagagaagaattgcagccagcttcaggatctacataagaagataatcactcagtttcagagatatcaccagccgcatactctttcaccagatcaggaagactgtatgtattggtacaactttctggcctatcacatggccagtgccaagatgcacaaggaactttgtgctttaatgttttccctggattggattaaagcaaaaacagaacttgtaggccctgctcatctgattcatgaatttgtggaatacagacatatactagatgaaaaggattgtgcagtcagtgagaattttcaggagtttttatctttaaatggacaccttcttggacgacagccatttcctaatattgtacaactgggtctctgtgagccggaaacttcagaagtttatcagcaagctaagctgcaggccaagcaggaggtcgataatggaatgctttacctggaatggataaacaaaaaaaacatcacgaatctttcccgcttagttgtccgcccccacacagatgctgtttaccatgcctgcttttctgaggatggtcagagaatagcttcttgtggagctgataaaaccttacaggtgttcaaagctgaaacaggagagaaacttctagaaatcaaggctcatgaggatgaagtgctttgttgtgcattctctacagatgacagatttatagcaacctgctcagtggataaaaaagtgaagatttggaattctatgactggggaactagtacacacctatgatgagcactcagagcaagtcaattgctgccatttcaccaacagtagtcatcatcttctcttagccactgggtcaagtgactgcttcctcaaactttgggatttgaatcaaaaagaatgtcgaaataccatgtttggtcatacaaattcagtcaatcactgcagattttcaccagatgataagcttttggctagttgttcagctgatggaaccttaaagctttgggatgcgacatcagcaaatgagaggaaaagcattaatgtgaaacagttcttcctaaatttggaggaccctcaagaggatatggaagtgatagtgaagtgttgttcgtggtctgctgatggtgcaaggataatggtggcagcaaaaaataaaatctttttgtggaatacagactcacgttcaaaggtggctgattgcagaggacatttaagttgggttcatggtgtgatgttttctcctgatggatcatcatttttgacatcttctgatgaccagacaatcaggctctgggagacaaagaaagtatgtaagaactctgctgtaatgttaaagcaagaagtagatgttgtgtttcaagaaaatgaagtgatggtccttgcagttgaccatataagacgtctgcaactcattaatggaagaacaggtcagattgattatctgactgaagctcaagttagctgctgttgcttaagtccacatcttcagtacattgcatttggagatgaaaatggagccattgagattttagaacttgtaaacaatagaatcttccagtccaggtttcagcacaagaaaactgtatggcacatccagttcacagccgatgagaagactcttatttcaagttctgatgatgctgaaattcaggtatggaattggcaattggacaaatgtatctttctacgaggccatcaggaaacagtgaaagactttagactcttgaaaaattcaagactgctttcttggtcatttgatggaacagtgaaggtatggaatattattactggaaataaagaaaaagactttgtctgtcaccagggtacagtactttcttgtgacatttctcacgatgctaccaagttttcatctacctctgctgacaagactgcaaagatctggagttttgatctccttttgccacttcatgaattgaggggccacaacggctgtgtgcgctgctctgccttctctgtggacagtaccctgctggcaacgggagatgacaatggagaaatcaggatatggaatgtctcaaacggtgagcttcttcatttgtgtgctccgctttcagaagaaggagctgctacccatggaggctgggtgactgacctttgcttttctccagatggcaaaatgcttatctctgctggaggatatattaagtggtggaacgttgtcactggggaatcctcacagaccttctacacaaatggaaccaatcttaagaaaatacacgtgtcccctgacttcaaaacatatgtgactgtggataatcttggtattttatatattttacagactttagaataaaatagttaagcattaatgtagttgaactttttaaatttttgaattggaaaaaaattctaatgaaaccctgatatcaactttttataaagctcttaattgttgtgcagtattgcattcattacaaaagtgtttgtggttggatgaataatattaatgtagctttttcccaaatgaacatacctttaatcttgtttttcatgatcatcattaacagtttgtccttaggatgcaaatgaaaatgtgaatacataccttgttgtactgttggtaaaattctgtcttgatgcattcaaaatggttgacataattaatgagaagaatttggaagaaattggtattttaatactgtctgtatttattactgttatgcaggctgtgcctcagggtagcagtggcctgctttttgaaccacacttaccccaagggggttttgttctcctaaatacaatcttagaggttttttgcactctttaaatttgctttaaaaatattgtgtctgtgtgcatagtctgcagcatttcctttaattgactcaataagtgagtcttggatttagcaggcccccccaccttttttttttgtttttggagacagagtcttgctttgttgccaggctggagtgcagtggcgcgatctcggctcaccacaatcgctgcctcctgggttcaagcaattctcctgcctcagcctcccgagtagctgggactacaggtgtgcgcacatgccaggctaatttttgtatttttagtagagacggggtttcaccatgttggccgggatggtctcgatctcttgacctcatgatctacccgccttggcctcccaaagtgctgagattacaggcgtgagccaccgtgcctggccaggccccttctcttttaatggagacagggtcttgcactatcacccaggctggagtgcagtggcataatcatacctcattgcagcctcagactcctgggttcaagcaatcctcctgcctcagcctcccaagtagctgagactgcaggcacgagccaccacacccagctaatttttaagttttcttgtagagacagggtctcactatgttgtctaggctggtcttgaactcttggcctcaagtaatcctcctgcctcagcctcccaaagtgttgggattgcagatatgagccactggcctggccttcagcagttctttttgtgaagtaaaacttgtatgttggaaagagtagattttattggtctacccttttctcactgtagctgctggcagccctgtgccatatctggactctagttgtcagtatctgagttggacactattcctgctccctcttgtttcttacatatcagacttcttacttgaatgaaacctgatctttcctaatcctcacttttttcttttttaaaaagcagtttctccactgctaaatgttagtcattgaggtggggccaattttaatcataagccttaataagatttttctaagaaatgtgaaatagaacaattttcatctaattccatttacttttagatgaatggcattgtgaatgccattcttttaatgaatttcaagagaattctctggttttctgtgtaattccagatgagtcactgtaactctagaagattaaccttccagccaacctattttcctttcccttgtctctctcatcctcttttccttccttctttcctttctcttcttttatctccaaggttaatcaggaaaaatagcttttgacaggggaaaaaactcaataactagctatttttgacctcctgatcaggaactttagttgaagcgtaaatctaaagaaacattttctctgaaatatattattaagggcaatggagataaattaatagtagatgtggttcccagaaaatataatcaaaattcaaagattttttttgtttctgtaactggaactaaatcaaatgattactagtgttaatagtagataacttgtttttattgttggtgcatattagtataactgtggggtaggtcggggagagggtaagggaatagatcactcagatgtattttagataagctatttagcctttgatggaatcataaatacagtgaatacaatcctttgcattgttaaggaggttttttgtttttaaatggtgggtcaaggagctagtttacaggcttactgtgatttaagcaaatgtgaaaagtgaaaccttaattttatcaaaagaaatttctgtaaatggtatgtctccttagaatacccaaatcataattttatttgtacacactgttaggggctcatctcatgtaggcagagtataaagtattaccttttggaattaaaagccactgactgttataaagtataacaacacacatcaggttttaaaaagccttgaatggcccttgtcttaaaaagaaattaggagccaggtgcggtggcacgtgcctgtagtcccagctccttgggaggctgagacaggaggattccttgagccctggagtttgagtccagcctgggtgacatagcaagaccctgtcttaaaagaaaaatgggaagaaagacaaggtaacatgaagaaagaagagatacctagtatgatggagctgcaaatttcatggcagttcatgcagtcggtcaagaggaggattttgttttgtagtttgcagatgagcatttctaaagcattttcccttgctgtatttttttgtattataaattacattggacttcatatatataatttttttttacattatatgtctcttgtatgttttgaaactcttgtatttatgatatagcttatatgatttttttgccttggtatacattttaaaatatgaatttaaaaaatttttgtaaaaataaaattcacaaaattgttttgaaaaacaaaaaaaaaaaaaa

SEQ ID NO: 205 - DNA, 3778 bp, Homo sapiens
tttttaaattttgcatttgacttaaagtgccatgagaaaatttgcatactgcaaggtggtcctagccacctccttgatttgggtactcttggatatgttcctgctgctttacttcagtgaatgcaacaaatgtgatgaaaaaaaggagagaggacttcctgctggagatgttctagagccagtacaaaagcctcatgaaggtcctggagaaatggggaaaccagtcgtcattcctaaagaggatcaagaaaagatgaaagagatgtttaaaatcaatcagttcaatttaatggcaagtgagatgattgcactcaacagatctttaccagatgttaggttagaagggtgtaaaacaaaggtgtatccagataatcttcctacaacaagtgtggtgattgttttccacaatgaggcttggagcacacttctgcgaactgtccatagtgtcattaatcgctcaccaagacacatgatagaagaaattgttctagtagatgatgccagtgaaagagactttttgaaaaggcctttagagagttatgtgaaaaaactaaaagtaccagttcatgtaattcgaatggaacaacgttctggattgatcagagctagattaaaaggagctgctgtgtctaaaggccaagtgatcaccttcctggatgcccattgtgagtgtacagtgggatggctggagcctctcttggccaggatcaaacatgacaggagaacagtggtgtgtcccatcatcgatgtgatcagtgatgatacttttgagtacatggcaggctctgatatgacctatggtgggttcaactggaagctcaattttcgctggtatcctgttccccaaagagaaatggacagaaggaaaggtgatcggactcttcctgtcaggacacctaccatggcaggaggccttttttcaatagacagagattactttcaggaaattggaacatatgatgctggaatggatatttggggaggagaaaacctagaaatttcctttaggatttggcagtgtggaggaactttggaaattgttacatgctcacatgttggacatgtgtttcggaaagctacaccttacacgtttccaggaggcacagggcagattatcaataaaaataacagacgacttgcagaagtgtggatggatgaattcaagaatttcttctatataatttctccaggtgttacaaaggtagattatggagatatatcgtcaagagttggtctaagacacaaactacaatgcaaacctttttcctggtacctagagaatatatatcctgattctcaaattccacgtcactatttctcattgggagagatacgaaatgtggaaacgaatcagtgtctagataacatggctagaaaagagaatgaaaaagttggaatttttaattgccatggtatggggggtaatcaggttttctcttatactgccaacaaagaaattagaacagatgacctttgcttggatgtttccaaacttaatggcccagttacaatgctcaaatgccaccacctaaaaggcaaccaactctgggagtatgacccagtgaaattaaccctgcagcatgtgaacagtaatcagtgcctggataaagccacagaagaggatagccaggtgcccagcattagagactgcaatggaagtcggtcccagcagtggcttcttcgaaacgtcaccctgccagaaatattctgagaccaaatttacaaaaaaacgaaaaaaataaggattgactgggctacctcagcatacatttctgccacattcttaagtagcaaaaaaggaaaagtgctttcctcctctgcaggatgtaaggtttatcagccattaaaacttagacttctctagcttttcactagctgtgaaccagccttcctgtccatggacgtgaaactgcatagtaatgagactgtgcacactgatgtttacaagattgaaagagtctttctccgaaaatcatggtaaagaatactgagacaatgaaaaaaaatcaacaaaatatgctttctggagaactgtaccttctatggtttgcttgcacatcagtagtttctgctgaacgtgctgtcataatgaagagatttccaagattttttttcctgattagaacgggtagccagtatattaaatattgatagaaaaataaaagaactggaaccagattcagaatcttgaaaacaacattttttacaacaaacaaaaaaactatattaaacagggtttaaaggaaaattaaaacagaactatgaagaagtacaatttgttatagtatagtatcaaatttctatatagattttatacctcagtggggaaaaataactgattccaatgacattcattttgttttcatctgtgatagtcatggatgcttttattttccttggggtgctgaaattgagctgaaaaaaaaaggctctttgaatatagttttaatttctctctacagttttttttgtttggtttgtgggctgttggaattgtaatttttaattgccttctaaaaaatggaaatttaacaatgtctgatctcagctgaacaaattagatgtttcagttgctcttgggtcaactggcttacagatttacatgtgcacacacacacaaatttcttatcacattttcgacttcttcacttgacctaactgattatgcgaaatacccaagattcatgctactgttccacatttgttttcacagcaataaatcttcagttctgttgtttatgattccacttaacaaggggcctgcaaatgtgatttattatttgggtatttggagataatacatttgagggttttttggaaaacctttttcactccatactcaaatatgcttcattgtcaaatgcatatttaaattaaattattgaattgtaatgtttatctgctgctttttttaaataaaatttgactgaaaatgtttaattggcattttttaatgacttacccaagaaaagtgcagctattattccatattaataggcttgcatttcttttcctaaatcttatttaggctaaatcagttttattgtcctctgattttttttaataccacagaaatcacctgagtgtcaattgaaaagttgtcaattaaaaggtaaccttttaactctcgtaggaggaatctcattaagacatttttcctgatatgtagagcagtctgttggcaaaaatgcatatattttctttcatatttgtaaaattatatttaatggaattcttttctttgattatcaaggactttcactgcaggcagtgctatttcttgtgcctaagaatgtttccaaaagtcgcatcgctaatgatatttgccaagttgagtgtacacaaagtttctcatatcctgttcaagttaatcaacatcaaacacatggggatgctttagggtgagtctataatacaaaatgcataaaccatgtccccaggaaatttgaaaggaagcaagtgctgaatggaatttttttccttttccatgagctgtgttaattctatctccagtaggcctaatgcttgaaataagcaagatgtctaatcaataaattattttcatgctcagaatttcaggtttttgtactccagcatagcttggtcttatttcttactgtatgaaagcttaacagcaatgtgatttaaggttttgttttaaatgggagatgtaagtgatttaattcatgggtacttttagaacctgatagataatcccattgcctttatttttctaattaaagaatcctaaatactttgaaaatacaaaatattcctg

SEQ ID NO: 206 - protein, 447 aa, Homo sapiens
CAGGATTTGGTCTGAGAAAGGCGATTTCATCAGAGAACTGGATAGAGCTTACTTACTCAAAGTAAGACGCACATGACGTCACCTGTCTTAAGGAATCACTGTGGCGTTTGTGGCTTGTCCTAGACTACAATGTGACTGAATCATATGGTTGAAGTAGTGACTAAATTAAGGCAGAAAATAATGGTGATGTCATTTCTGGTGTGCTTTTGAAAGGGGTCTCCTTAACAATTAAAACGCAAAGAAGAGTAATTAAAGGTCTAGCACCAAGAAGCCCTTTGAGTCGCTCTCAAAGGATTACAATATGTTTGCTTTTATTAGGCTCCAATATCCAGGCCACAAATTGAGCAACTTTTTGAAATGTTGGGTGATATTTTTCTTTAATCAAGAGCGTAATCCCACATAGAGATCCTAGAGGTCTCTTATTGTTGTGTTCCCATTGAGTTGGTT

SEQ ID NO: 207 - protein, 441 aa, Homo sapiens
GGAACCCACCCAGACCCGAAATGACTGAGGCTACTCAGCCAGTCCTAGAGAATTTCAGCAGGACAGCATCTGGAGGTGCCTTTGTGATGTCCAATGTTCCAATTGGTCCATTGCCTGATCAGTACCCACCAAATCGAATCACAGACCTCCAGGCCACACTCGATGGGGAAGAGATCAGTCTAACATGGACGGCCCCAGGAGATGATTATGATGTTGGAAGAGTTCAACAGTATATCATAAGAACAAGCGAAAATATCATTGATCTCAGAGACAATTTTAATAATTCTCTTCGGGTTGATACTACTAAACTTACACCAAAAGAAGCCAACTCCAAAGAAACCTTTGCCTTTAAACCAGAAAATATCTCAGAAGAAAATGCAACCTACATATTCATTGCCATTGAAAGTGTCGACAAAAACAATTTGAGTTCGGGACCATCCA

SEQ ID NO: 208 - protein, 361 aa, Homo sapiens
AAACTAAGTAGCAGCATTTTGTTTACAGGGCTTGGATATTGTAGATGACGTGGGATCCGGTCCCTCATCCCTAGCACTAGATCTAGGTCCTAGGGAGATGCCGCCATTGTGCTGTTCCCTGGTGTACCACAGATCAGTGAAAGTGTTTTATCTTTTTTACGTCGTTTGTATGGATTGGATTTTATAATGGTAAGAAAACAGAGTGTTGTATTTTGAGCTGAAATTTGTGTATGGTCAAGTAATTCTGTTTTATGTATTGGAAGTCCGTTTACAACTTGAACTATTTTCTAGAAGAGTGTTGGACAAAATGAATTGTCTTCAAGCTGTTTCATTAACTAATAAAGTCATTTGATGGGGAAGA

SEQ ID NO: 209 - protein, 470 aa, Homo sapiens
AATCACTACTGGATCTAGTATCTTGCTACTGATGTCTTTCTTTTGGTTTATTTATGCCATAGACTGTGGTTGTTTGGCCTATGCATGAATATATAAATATTTATGTATGTAAAGCTTTTCCAAATAGCTCTCTGAAGAGTTGAATTTTTAACTTCTTATTGTTTTTGCATTGCTTTCTGAGCTGAATTTGAGTAACAGATTAACTATAACATAAAGCTATAGATTCTTACATGCTTTGATAATAGCCCAGATATCTATGTTGTTTTTACATTGGTGTCAGACAGGCACAGGACATTTAACACAAGAGCTAAAACAAAAACTGGATCTGGCTGAATAGAACAGAAAACAATCCTAGTCCACCTGTATGTGTCGCAGGCTTGGCAACAGATCATGAGTGACCACAGTTCCCACCGCATTCTCATACAGGCCAATTCCCTATTGTTTTAGTAGGGCTGCCTTTGGAAATGGAG

SEQ ID NO: 210 - protein, 318 aa, Homo sapiens
ACGGCAAGCAAGTTTTCCTCTGGCTTCCGCATGCATACGCGCACATGCACCTGTACATACGTGACCATGCACACCATCAGAGGGTTTTTTTCTTTGCGGCTCATTCTTGCCCAGCCTAAGTCAGGCAGAAGCAGCGTCAATGTGTGTGATGTAGTGGTCCTTTTCCCATGGGTCTCTTTCTGAATTTGGAGCTACGTGAAATGAAAGGGTAGGTTGGTTTGTTTCTTTGACTAAGTCAGCCGGTTGGCTTACATATGGTGAAAACGGGGCGGTCTGGGGCAGAAGTGAGTGCAAGTGTGAAAATCGAAACATTCAGGA

SEQ ID NO: 211 - protein, 343 aa, Homo sapiens
GTACGCTTTCTAAAGCTTATCTCAGGTCTACTGGTAGTCATGCTCTCTAGGGCCCATTGCTCATTTAGTGGTGTATACTGAATTATGAACTCCTAGGGCAAACACAGTTAGGATCTTTCAAGACCATTCACATATTTTATCAGCATATTAATAGGTAACTTTGTTTTATAAATGTTTCTGTTTGAAGGCACCATATGTAATAATACTGTTACTTCATCAGTTTTAAATCCATAACAACACTAACTCATACCTGATTTAAGCTCAGCGATTGTGTCAGGGCGCCTTAAATCATATCATATCCTTCATGTGGTCAGCAATATTAGATACCACTTTGCCAGTATAT

SEQ ID NO: 212 - protein, 546 aa, Homo sapiens
GAGAGAGAGAGAAATAGGTCAGATCAGTATGTTGCAAGCAGATCTTTAGAGCCTGTCAAGTTTTGGTTAGTTGTAGTTTCCATTTGGAAATGTAGATGAATGCTTGTAGATATTGGAGATTGTTTCTATCTTGTAAGAACTTTTCACTGGTGCTGTAAGATTTCAAATAGCACCAGTCTTAACCTTTAAATGGGAAGTAGAAAAGGTGAGCCCAAAGTTTACAGATGATTTTAATGCTATACATGTTAGTGTAGTGATACTTAGAATGCTTTGTTTGATGTTTATTTCAGAAATGCGTATACTAGAAAATCATTTTAATATTAAAACTGGTGACTTAAATCCAGTTTGTAAAGTGTTTTCTTAAAGAAGGATCTTGGTACTTAATTGATAAAGTGGGTTTAGATAGGAGTAGCAAGTGCTCTCGATAGAGAAAGTTTTTGTTCACTTCAATACTTTGTCATTACAACCAGTTCTTCCTGAAAATAGTTACATGTCTAGTAAATTGATGTAGAATTAACTCGCTGGAGATAATCTCATTTTAGTTCT

SEQ ID NO: 213 - DNA, 2947 bp, Homo sapiens
acttttacttttgacgaccaccatgactgagatcactgctgaaggaaatgcatctacaaccacaactgtgatagacagcaaaaatggatctgtgcccaaatcccccggaaaagtgctgaagaggacagtcacagaagacatagtgacgacgttcagctcccctgcagcctggcttctggtcattgccctgataatcacgtggtcagctgttgccatcgttatgtttgatttagtggattacaaaaacttttcagcaagctctattgccaagattggctcagatcctttaaaactggtacgtgatgctatggaggaaaccacggactggatctatggcttcttttctttgttatctgacatcatctcatctgaagatgaagaagatgatgatggtgacgaagatactgataaaggagaaatagatgagcctcccttgagaaaaaaagaaatacacaaagataagactgaaaaacaagagaaacctgaaaggaaaatacaaactaaagttacacacaaagaaaaagaaaaaggaaaagaaaaagtaagagaaaaagaaaaacctgaaaagaaagcaactcacaaggaaaaaattgagaaaaaagaaaaaccagaaacaaagacagtggcgaaagaacagaagaaagctaagactgcagaaaagagtgaagaaaagactaaaaaggaagtgaaaggtggaaaacaggagaaagtgaagcaaacagctgcaaaagtaaaagaagtacagaaaacaccatcaaaacccaaagaaaaggaggacaaagagaaagcagctgtgtcaaagcatgaacagaaagatcagtatgcattctgtcgatatatgattgacatatttgtccatggggatttaaaaccaggacaaagcccagccattccacctcccttaccgacagaacaagcttccagacccactccggcatcacctgcccttgaagaaaaagaaggggaaaagaagaaggctgagaagaaagttacttctgaaacaaaaaagaaagaaaaagaagatatcaaaaagaaaagtgagaaggaaactgccattgatgtggaaaaaaaagagccgggaaaagcttctgaaaccaaacaagggactgtaaaaattgcagcacaagcagcagctaagaaggatgaaaagaaggaagattccaagaaaacaaaaaaacctgcagaagtagaacaacccaagggaaaaaagcaggaaaagaaagaaaaacatgtggaaccagcaaagtcaccaaagaaagaacactcagttccaagtgacaaacaagtaaaagcaaaaactgaacgagccaaagaggagattggtgcggtttcaagtaaaaaagctgtacctggaaagaaggaagagaaaacaaccaagacagtggagcaagaaattagaaaagaaaaatctgggaagacttcttcaattctgaaagataaagaacctattaaagggaaagaagagaaagttccagcttccctaaaggaaaaagaacctgaaactaaaaaagatgaaaagatgtccaaagcaggcaaagaagtcaagcctaaacctccacaactacaaggaaaaaaggaagagaagccagagccccaaattaaaaaagaagcaaaaccagctatatctgaaaaagtgcaaatacacaaacaagacatagtgaaaccagaaaagactgtttctcatggtaaaccagaagaaaaagttctcaagcaggtaaaagctgtcacaatagaaaaaacagccaagcccaaaccaacaaaaaaagctgaacatcgagaaagagaacctccatctataaaaacagacaaaccaaaaccaactccaaaaggaacatcagaagtcacagaatcaggaaagaagaaaactgaaatatctgaaaaagaaagtaaagaaaaagcagacatgaagcatcttagagaagaaaaagtctcaacaagaaaagaaagtcttcaattacacaatgtgacaaaagcagaaaaacctgcaagagtatcaaaagatgttgaagatgtaccagcttcaaagaaagctaaagaaggaactgaagatgtgtctcccacaaagcagaaaagtcccatcagtttcttccagtgtgtctacttggatgggtacaatggctatggatttcagtttcctttcactcctgcagaccgccctggagagagctctggtcaagcaaattctccaggacagaagcaacaaggacagtaaacacacatgtatgacccttacaagtgctttaagattttaaaaatgtgatgttttgtccacagtagttcaggcaattaagaatatgcaacccagagaatttctgtgaaaacattttgctctttggcctggtgtggacggaaagggtggccaaatggattgagtgatgagcagacatgtttaagggtctaagtctcaagaatctgttatgtgtgtttgctgcggtgggagggggtgcttgtatttatcttatttccagtcactataaggttgtacacaaactaatttaaagtttacttaataatggtatctttaaaataattgacacaattgcaaaatgaattcctggcttcagttagctattatttttttaatgacaacatagactgtgctctaagtttaaaagatggggaagcttatataaaagtgacccttttgcatcatatgggtatctaaacttaatttacccaataagttgatgcttaatgattttattttatttttgtctattttctattttagttgtggctttgctctaagaatgggtaatagttgtactacagactgctataaatttcttgtgatactcttttagagctcaaaatatctctgagctttagacatggtaaggtggagagtaaatgcttgataaatctttaagatatgtcttgaatgataattaggacattcagtccagtggaaatacaccattcaattagtcaggtctggtgaatttcc

SEQ ID NO: 214 - protein, 491 aa, Homo sapiens
CTTTGCACGGCATTCCTGGCTAACATCTACAATGGGAGGTGTAGAGAAAGACATGGAGATGACTTGATTGTGACCCCGTTTGCTCAGAATTTCATGCCTCATGAAAGACACTATGGCCTGACGTCAGCAGCTAGCTATTTGGATACTTCGTCACAGGCGGTGTGACCTTTCGGAGTTGTGAGTGATAATGAGCCAGGTTTTCCAGTGACTGGCTGGCTTACTCGGAGGTTCTATGAACTCCTTCAGGGGGACTGCTGAAGGTCACCATGGCTGCAGAGCATAAACAGCTTCCTTTTGACTTGCACAAGTTCCCGTCAGCTTCGAGAAAACAAACACCCGAGACACAGAGTGACTTTCGTCTGGACCACTGTCCGATGAAGAAACTCAGGGCACAGTTCTCAAACCCCTAGGTCAATTAGAAAACGGAGGATTCTGTATATTGCCACTAATAAGCATTCAGCAAACTTCCTATGGGCCAGATAAGTCAATGG

SEQ ID NO: 215 - DNA, 2313 bp, Homo sapiens
acgagcatccggactagttattgagcatctgcctctcatatcaccagtggccatctgaggtgtttccctggctctgaaggggtaggtgtgatggccaggtgcttcagcctggtgttgcttctcacttccatctggactacgaggctcctggtccaaggctctttgcgtgcagaagagctttccatccaggtgtcatgcagaattatggggatcacccttgtgagcaaaaaggcgaaccagcagctgaatttcacagaagctaaggaggcctgtaggctgctgggactaagtttggccggcaaggaccaagttgacacagccttgaaagctagctttgaaacttgcagctatggctgggttggagatggattcgtggtcatctctaggattagcccaaaccccaagtgtgggaaaaatggggtgggtgtcctgatttggaaggttccagtgagccgacagtttggagcctattgttacaactcatctgatacttggactaactcgcgcattccagaaattatcaccaccaaagatcccatattcaacactcaaactgcaacacaaacaacagaatttattgtcagtgacagtacctactcggtggcatccccttactctacaatacctgcccctactactactcctcctgctccagcttccacttctattccacggagaaaaaaattgatttgtgtcacagaagtttttatggaaactagcaccatgtctacagaaactgaaccatttgttgaaaataaagcagcattcaagaatgaagctgctgggtttggaggtgtccccacggctctgctagtgcttgctctcctcttctttggtgctgcagctggtcttggattttgctatgtcaaaaggtatgtgaaggccttcccttttacaaacaagaatcagcagaaggaaatgatcgaaaccaaagtagtaaaggaggagaaggccaatgatagcaaccctaatgaggaatcaaagaaaactgataaaaacccagaagagtccaagagtccaagcaaaactaccgtgcgatgcctggaagctgaagtttagatgagacagaaatgaggagacacacctgaggctggtttctttcatgctccttaccctgccccagctggggaaatcaaaagggccaaagaaccaaagaagaaagtccacccttggttcctaactggaatcagctcaggactgccattggactatggagtgcaccaaagagaatgcccttctccttattgtaaccctgtctggatcctatcctcctacctccaaagcttcccacggcctttctagcctggctatgtcctaataatatcccactgggagaaaggagttttgcaaagtgcaaggacctaaaacatctcatcagtatccagtggtaaaaaggcctcctggctgtctgaggctaggtgggttgaaagccaaggagtcactgagaccaaggctttctctactgattccgcagctcagaccctttcttcagctctgaaagagaaacacgtatcccacctgacatgtccttctgagcccggtaagagcaaaagaatggcagaaaagtttagcccctgaaagccatggagattctcataacttgagacctaatctctgtaaagctaaaataaagaaatagaacaaggctgaggatacgacagtacactgtcagcagggactgtaaacacagacagggtccaagtgttttctctgaacacattgagttggaatcactgtttagaacacacacacttactttttctggtctctaccactgctgatattttctctaggaaatatacttttacaagtaacaaaaataaaaactcttataaatttctatttttatctgagttacagaaatgattactaaggaagattactcagtaatttgtttaaaaagtaataaaattcaacaaacatttgctgaatagctactatatgtcaagtgctgtgcaaggtattacactctgtaattgaatattattcctcaaaaaattgcacatagtagaacgctatctgggaagctatttttttcagttttgatatttctagcttatctacttccaaactaatttttatttttgctgagactaatcttattcattttctctaatatggcaaccattataaccttaatttattattaacatacctaagaagtacattgttacctctatataccaaagcacattttaaaagtgccattaacaaatgtatcactagccctcctttttccaacaagaagggactgagagatgcagaaatatttgtgacaaaaaattaaagcatttagaaaaaaaaaaaaaaaaa

SEQ ID NO: 216 - protein, 405 aa, Homo sapiens
ATCAGTGCTACAAAATAACTTTATTTAAAAATGCTCATATGTACACCAAATTTTAACACAATTTATTAGCACAAAACAATGAACATTATTCCAAGTCTGTAACCACAATAAACCAGGTACCTCACAATGTTCTATTTTAGCTTACCAGAAAAAAAAAAACAAAACATTGAAACCCTTGTTAACAATCTTCCCATACTTTAAAATTCACAGCACGCACTTCCTGAATAGATCCTAGACAACTAGCAATGTATTATATATCATTTACACAAATAGAAAGGCACACCAATTCTGAGTGCACAGAGCAAAGCAATCTTAGACAAGAATCTGGAATAGGCTATACAAAATAATCTGGAAAACTCCAAGGAGCAGGCATGCTACTAGAACGGCCCTTGCCCACTGAGCTGT

SEQ ID NO: 217 - protein, 320 aa, Homo sapiens
GTCTTGATTTTGTCTTTATATGCGAGGGAACTACTGGGAACTGGGCCTGACTTTGTAGATCCTCCTTTTCTTGGCGGGGACGGGCGTGCGGTCCCGCTCCCCGTAATGTACGGAGGTAGAAGAAAGGGCTCTGGCCTCTCGGCGTTATGTCTTCGGTGCTTGCGGCTTCCCGTTCGCGGGTTCTATCCTCAGACGCCGGAACACTTAACCGTGCAGAAATGTAGCTAGGTCCCGCAGTCCCCTCTGGGTTACTCAACGCTTTTTATTTTATTTTAGGTCGACATTGACGCTCCCGGAGTGATGGTTAACATTTTCTTTGC

SEQ ID NO: 218 - DNA, 2150 bp, Homo sapiens
ctcgagccacgaaggccccgctgtcctgtctagcagatacttgcacggtttacagaaattcggtccctgggtcgtgtcaggaaactggaaaaaaggtcataagcatgaagcgcagttcagtttccagcggtggtgctggccgcctctccatgcaggagttaagatcccaggatgtaaataaacaaggcctctatacccctcaaaccaaagagaaaccaacctttggaaagttgagtataaacaaaccgacatctgaaagaaaagtctcgctatttggcaaaagaactagtggacatggatcccggaatagtcaacttggtatattttccagttctgagaaaatcaaggacccgagaccacttaatgacaaagcattcattcagcagtgtattcgacaactctgtgagtttcttacagaaaatggttatgcacataatgtgtccatgaaatctctacaagctccctctgttaaagacttcctgaagatcttcacatttctttatggcttcctgtgcccctcatacgaacttcctgacacaaagtttgaagaagaggttccaagaatctttaaagaccttgggtatccttttgcactatccaaaagctccatgtacacagtgggggctcctcatacatggcctcacattgtggcagccttagtttggctaatagactgcatcaagatacatactgccatgaaagaaagctcacctttatttgatgatgggcagccttggggagaagaaactgaagatggaattatgcataataagttgtttttggactacaccataaaatgctatgagagttttatgagtggtgccgacagctttgatgagatgaatgcagagctgcagtcaaaactgaaggatttatttaatgtggatgcttttaagctggaatcattagaagcaaaaaacagagcattgaatgaacagattgcaagattggaacaagaaagagaaaaagaaccgaatcgtctagagtcgttgagaaaactgaaggcttccttacaaggagatgttcaaaagtatcaggcatacatgagcaatttggagtctcattcagccattcttgaccagaaattaaatggtctcaatgaggaaattgctagagtagaactagaatgtgaaacaataaaacaggagaacactcgactacagaatatcattgacaaccagaagtactcagttgcagacattgagcgaataaatcatgaaagaaatgaattgcagcagactattaataaattaaccaaggacctggaagctgaacaacagaagttgtggaatgaggagttaaaatatgccagaggcaaagaagcgattgaaacacaattagcagagtatcacaaattggctagaaaattaaaacttattcctaaaggtgctgagaattccaaaggttatgactttgaaattaagtttaatcccgaggctggtgccaactgccttgtcaaatacagggctcaagtttatgtacctcttaaggaactcctgaatgaaactgaagaagaaattaataaagccctaaataaaaaaatgggtttggaggatactttagaacaattgaatgcaatgataacagaaagcaagagaagtgtgagaactctgaaagaagaagttcaaaagctggatgatctttaccaacaaaaaattaaggaagcagaggaagaggatgaaaaatgtgccagtgagcttgagtccttggagaaacacaagcacctgctagaaagtactgttaaccaggggctcagtgaagctatgaatgaattagatgctgttcagcgggaataccaactagttgtgcaaaccacgactgaagaaagacgaaaagtgggaaataacttgcaacgtctgttagagatggttgctacacatgttgggtctgtagagaaacatcttgaggagcagattgctaaagttgatagagaatatgaagaatgcatgtcagaagatctctcggaaaatattaaagagattagagataagtatgagaagaaagctactctaattaagtcttctgaagaatgaagataaaatgttgatcatgtatatatatccatagtgaataaaattgtctcagtaaaaaaaaaaaaaaaaaaaaaaaaaaaaaaaaaaaaaaaaaaaaaaaaaaaaaaaaaaaaaaaa

SEQ ID NO: 219 - protein, 193 aa, Homo sapiens
CCAATCTGAAGCTCACACATAGGGTGCACAAGGAAGAGAGCATCAGCCATGCTNNAGAAGACATTANNGTAGTCGCCAGTGCGGCNNTCCTGTTCCGTGCTTTAGCTCCTGTNNNTTGTTANNCAGTTGANGNAGCTGAGACTCNTNNGTTAACCGATTANAGTGAAAGCCCCCAGCAAGTCCCCTGTGAGAA

SEQ ID NO: 220 - protein, 560 aa, Homo sapiens
GGCACGAGGGAAAAGACTGGCCTGGGAGCTGATAGCAAGGAGCTTGGCTGTGTGGGACTATGCAGGAGATGTTTCAGGCTATTTGGAAGGAAGTTGGTTCCCGTACCGGTCTCAAGTTTACCTTGCAGTTTCTTTTCTCGGACCCACACACTTCTCTCTGACCCAAGGAGTGGGAAGGCTGGCCCCTTTGAAACCTCTTTCTGCAAACAGATAAGCCTGACTGTGTTTTGTTTTGCTTTCAGCTGAACCAAACACATGGAATCTGGAGGTTAAAAGACTGCCAAGAAGTCAAGGGGAGAGAGAAATGAGGATGGAAAAGGAAACTCTGCTGTTCTGTGGCCTTTGGGGCTTTGACCTCGTCTGGAAGCCATTAACAATTGTTCTAAGCCCATCGCCTGAATTCTGAGGTTCAGCCGTCTGCCACACACTCTCTGGGTGACCTTGACCACAATCATCTACTGTGGATTCCCAGTGGCACCTGTCTGGCTCAAGCCCCTGCTCTGCCTACAGAGCTGCATATACAGCTGCCTCTAGAACATTTCTATCTGGTGGCTCCCTTT

SEQ ID NO: 221 - DNA, 3270 bp, Homo sapiens
ggccgcgggcaccagagtgccgagcccaggacgcccccggcccaggcccttggggtggacaagtccttcacttctcgccggagtgtgtggaggagcgatgggcagaaccagcacttccctcaggcactagacctgtcacgagtgaacttagttccctcctatactccttcactctaccctaagaacacagatctatttgagatgattgagaagatgcagggaagcaggatggatgaacaacgctgctccttcccgccgcccctcaaaacagaggaggactacattccatacccgagcgtgcacgaggtcttggggcgagaaggacccttccccctcatcctgctgccccagtttgggggctactggattgagggcaccaaccacgaaatcaccagcatccccgagacagagccactgcagtcgcccacaaccaaggtgaagctcgagtgcaaccccacagcccgcatctaccggaagcactttctcggcaaggagcatttcaattactactcactggacactgccctcggccaccttgtcttctcactcaagtacgatgtcatcggggaccaagagcacctgcggctgctgctcaggaccaagtgccggacataccatgatgtcatccccatctcctgcctcaccgagttccctaatgttgtccagatggcaaagttggtgtgtgaagacgtcaatgtggatcggttctatcctgtgctctaccccaaggcttcccggctcatcgtcacctttgacgagcatgtcatcagcaataacttcaagtttggcgtcatttatcagaagcttgggcagacctccgaggaagaactcttcagcaccaatgaggaaagtcccgctttcgtggagttccttgaatttcttggccagaaggtcaaactgcaggactttaaggggttccgaggaggcctggacgtgacccacgggcagacggggaccgaatctgtgtactgcaacttccgcaacaaggagatcatgtttcacgtgtccaccaagctgccatacacggaaggggacgcccagcagttgcagcggaagcggcacatcgggaacgacatcgtggctgtggtcttccaggatgaaaacactcctttcgtgcccgacatgatcgcgtccaacttcctgcatgcctacgtcgtggtgcaggctgagggcgggggccctgatggccccctctacaaggtctctgtcactgcaagagatgatgtgcccttctttggaccccccctcccggaccccgctgtgttcaggaaggggcctgagttccaggaatttttgctgacaaagctgatcaatgctgaatatgcctgctacaaggcagagaagtttgccaaactggaggagcggacgcgggccgccctcctggagacgctctatgaggaactacacatccacagccagtccatgatgggcttgggcggcgacgaggacaagatggagaatggcagtgggggcggcggcttctttgagtctttcaagcgggtcatccggagccgcagccagtccatggatgccatggggctgagcaacaagaagcccaacaccgtgtccaccagccacagcgggagcttcgcgcccaacaaccccgacctggccaaggcggctggaatatcactgattgtccctgggaagagccccacgaggaagaagtcgggcccgttcggctcccgccgcagcagcgccattggcatcgagaacatacaggaggtgcaggagaagagggagagccctccggctggtcagaagaccccagacagcgggcacgtctcacaggagcccaagtcggagaactcatccactcagagctccccagagatgcccacgaccaagaacagagcggagaccgcagcgcagagagcagaggcgctcaaggacttctcccgctcctcgtccagtgccagcagcttcgccagcgtggtggaggagacggagggtgtggacggagaggacacaggcctggagagcgtgtcatcctcaggaacaccccacaagcgggactccttcatctatagcacgtggctggaggacagtgtcagcaccactagtgggggcagctccccaggcccctctcgatcaccccacccagacgccggcaagttgggggaccctgcgtgtcccgagatcaagatccagctggaagcatctgagcagcacatgccccagctgggctgttagccgggccaccccctctgaaggtgaaactgagcagatgaggccacagaagcacaaggggaaggtgccgtgtcaagcccaggcagacgagacctctgccctgaagaccaacaccagcccgtgggctgccccctgcctccccaccctccccatggcccacccatctgggctgtctctgcagggcagagccgtccagacctgggatcagggaagctgctggcatcgtccccacccccagcctgggggtctgcgctggggcagggattgctcagtggaagcaggactgggggtctggcttgccccctccctgggcctccatcacccctgagcatccctctggactcagagggaacaaggtgggagagagagtttgagacagctccgtgtggagagcttagcccctggaggcagcacaaggaggatgtgatatgtgggggagtgagcactgggttgggagccgggtcctggtttccaatttgggttctgctgtgtgactctgggcaagtcactctccctctctgggcatgtctgctacaaatggacaagattatttcagaggtcactgaagactgtgattacatgcacctgccttagaaggtaggattttcttcccagggacctcctatcaccctaccctgcttcttgaggtccctggagccccaggtgggctgaggggcagggagccggctgtgcccagtatgcctcctggaccctccagttctgccacaggtctgccgatgccctgtccactgcctacacatgacagacaagtaaccccctcatgggggatggggacctacctggctcctcagccagcacccagcttaacccctgccatcccatgctgggccctccaggccaagagtctcagctggccgagagtccaggccttgcctcccccgaccgccatggagggggcagcccggcacagctgctgggagcccttgtgtgtctggtcacactttttaggcgtcacgccaaaggccagcctcctggccccaatacccattttggaagcccctgtggccgtgtggatgtcggtaacagttgtataaaataaattctatttatcgctattgt

SEQ ID NO: 222 - DNA, 3244 bp, Homo sapiens
taatagaacacttcacctgaacctaaaatggtgagcgagagtcaccatgaggccctggcagccccgcctgtcaccactgtcgcgactgttctgccaagcaatgccacagagccagccagtcctggagaaggaaaggaagatgcattttctaagctgaaggagaagtttatgaatgagttgcataaaattccattgccaccgtgggccttaattgcaatagccatagtcgcagtccttttagtcctgacctgctgcttttgtatctgtaagaaatgtttgttcaaaaagaaaaacaagaagaagggaaaggaaaaaggagggaagaatgccattaacatgaaagatgtaaaagacttagggaagacgatgaaagatcaggccctcaaggatgatgatgctgaaactggattgacagatggagaagaaaaagaagaacccaaagaagaggagaaactgggaaaacttcagtattcactggattatgatttccaaaataaccagctgctggtagggatcattcaggctgctgaactgcccgccttggacatggggggcacatctgatccttacgtgaaagtgtttctgctacctgataagaagaagaaatttgagacaaaagtccaccgaaaaacccttaatcctgtcttcaatgagcaatttactttcaaggtaccatactcggaattgggtggcaaaaccctagtgatggctgtatatgattttgatcgtttctctaagcatgacatcattggagaatttaaagtccctatgaacacagtggattttggccatgtaactgaggaatggcgtgacctgcaaagtgctgagaaggaagagcaagagaaattgggtgatatctgcttctcccttcgctacgtacctactgctggtaagctgactgttgtcattctggaggcaaagaacctgaagaagatggatgtgggtggcttatccgatccttatgtgaagattcatctgatgcagaatggtaagaggctgaagaagaaaaagacaacaattaaaaagaacacacttaacccctactacaatgagtcattcagctttgaagtaccttttgaacaaatccagaaagtgcaggtggtggtaactgttttggactatgacaagattggcaagaacgatgccatcggcaaagtctttgtgggctacaacagcaccggcgcggagctgcgacactggtcagacatgctggccaaccccaggcgacctattgcccagtggcacaccctgcaggtagaggaggaagttgatgccatgctggccgtcaagaagtaaaggaaagaagaagcctttctgcatttgcccatatagtgctctttagccagtatctgtaaatacctcagtaatatgggtcctttcatttttccagccatgcattcctaacacaattcagtggtacttggaatcctgttttaatttgcacaaatttaaatgtagagagcccctaagtccttcatcataccactgccctccaaatctactcttcttttaagcaatatgatgtgtagatagagcatgaatgaaattatttattgtatcacactgttgtatataccagtatgctaaagatttatttctagtttgtgtatttgtatgttgtaagcgtttcctaatctgtgtatatctagatgtttttaataagatgttctattttaaactatgtaaattgactgagatataggagagctgataatatattatacggtaaatatagtatcgtctgcattccagcaaaaatatcaactcgtaaggcactagtacagttaaactgacatcttaaaggacaacttaaacctgagctttctattgaatcatttgagtaccaagataaacttacaccacatacttggtgggtgaatccaattttgtagaattcctacacaggcaaaatagcatgatctgagcagcagcatccaggctgacctcaaggaagcatagccacaaaacagaatagcacctgtctgtacatatttacaaagctaaaataatggcttcactcttatatttgaggaagcaactgaacaggagtcaatgatttcatattactgcatatagaataacaacaaggtgttccgtgtgtgtgtgtgtgtgtgtgtgtgtgtgtgtgtgtgtgtgtgtgcacatttgtttggggatgggggagaagaagctaaggggagaagtcaacatttatgaaatattgcctgactatttaaaaagaaaaaagtagctctccattatcacctttatacaaaatgtacatcctgtgaattctgttccagatttcacacctacaataattccaaaaggtttgcacattagagtttgtaacaaaatattttattatataaaaccaggttagaaggaatgcaggatatttttaacacaacaatctgtgcttattacacaaaattactttgtggtaaacagacagtattgtaatcccatcaaaagatgaaagaaaaacaaaaacaaaaaccaacaacaattagccatagttctgaatgcacttcaattaagccaaaacagacagctagtgatctttttatatgctctttttacttaagttttaatttgtcctttaaaaaaaggtgaaacaaaccaagaacaagttctagaaaactgaagcaacctcttatgtatactagatgcttgatttaggaggagtttttaaacgttttcaatgttattatgtagtaaatgacactattatgaagctactagtcattccataagagtcttaaaggactgctctgtgtacactgtgactgccgtgtgtgcttagacccgtagtttcctcagtggatagcactcaatttattccgtagtgatattgtaacaatactgccattcccttctactgcactgcccaaggtgtgtgtagcacaaacagttctcattacaaaggaccaattcagaactgaaaagctatgcataggacaaggaagatacatagaatggggtggaacacagcattttgtcaagcactgtgcaatattccatatttttccccactatggtagacaaccatttcgtggaagggcagcctattatcccacactgcatctagccttttgtcccattcacttctgtgatccattttaatttccaggccacaagacagtagtgatgctctgaaatgaaagtttgtcttcacaaatatcaaaacaaaatggaggaaaactaagcattggcctcatgttcagtcttcaggatatcacaccacgtcttttcaaaaactaaa

SEQ ID NO: 223 - DNA, 1831 bp, Homo sapiens
cccacgcgtccgctttagtgcgctcgccgtcggctctacctgcgtgctttagctccttctcgcctgatccttctgtctctcccaaccccggacacccggcttcgactggttatatcttcggtgttcttttcctctcttcttctttcgcggttcagcatgcaggaaaaagacgcctcctcacaaggtttcctgccacacttccaacatttcgccacgcaggcgatccatgtgggccaggatccagagcaatggacctccagggctgtagtgccccccatctcactgtccaccacgttcaagcaaggggcgcctggccagcactcgggttttgaatatagccgttctggaaatcccactaggaattgccttgaaaaagcagtggcagcactggatggggctaagtactgtttggcctttgcttcaggtttagcagccactgtaactattacccatcttttaaaagcaggagaccaaattatttgtatggatgatgtgtatggaggtacaaacaggtacttcaggcaagtggcatctgaatttggattaaagatttcttttgttgattgttccaaaatcaaattactagaggcagcaattacaccagaaaccaagcttgtttggatcgaaacccccacaaaccccacccagaaggtgattgacattgaaggctgtgcacatattgtccataagcatggagacattattttggtcgtggataacacttttatgtcaccatatttccagcgccctttggctctgggagctgatatttctatgtattctgcaacaaaatacatgaatggccacagtgatgttgtaatgggcctggtgtctgttaattgtgaaagccttcataatagacttcgtttcttgcaaaactctcttggagcagttccatctcctattgattgttacctctgcaatcgaggtctgaagactctacatgtccgaatggaaaagcatttcaaaaacggaatggcagttgcccagttcctggaatctaatccttgggtagaaaaggttatttatcctgggctgccctctcatccacagcatgagttggtgaagcgtcagtgtacaggttgtacagggatggtcaccttttatattaagggcactcttcagcatgctgagattttcctcaagaacctaaagctatttactctggccgagagcttgggaggattcgaaagccttgctgagcttccggcaatcatgactcatgcatcagttcttaagaatgacagagatgtccttggaattagtgacacactgattcgactttctgtgggcttagaggatgaggaagacctactggaagatctagatcaagctttgaaggcagcacaccctccaagtggaagtcacagctagtattccagagctgctattagaagctgcttcctgtgaagatcaaatcttcctgagtaattaaatggaccaacaatgagcctttgcaaaattttcaagcggaaattttaaggcacctcattatctttcataactgtaattttcttagggatcatctctgttaaaaagttttctgtatgtcatgttataattacaggtcaattctgttaatatctttttgttaattttgctctatgtttgcctctgaaggaggtgagatttgtgctactttgggagattatgttcttttttcatgtctaagatttattttgatcatgtttataatataatggtaattcatttttgatgttttgtgaagaatttaaatttaaacgaatgttcttaaatcaagtgtgatttttttgcatatcattgaaaagaacattaaaagcaatggtttacacttaaaaaaaaaaaaaaa

SEQ ID NO: 224 - DNA, 1199 bp, Homo sapiens
gcagcagcggcggcgggcatggcagaggcgcgatcccagccctcggcggggccgcagctcaacgcgctaccggaccactctccgttgctgcagccgggcctggcggcgctgcggcgccgggcccgggaagctggcgtcccgctcgcgccgctgccgctcaccgactccttcctgctgcggttcctgcgcgcccgggatttcgatctggacctggcctggcggttactaaaaaactattataagtggagagcagaatgtccagaaataagtgcagatctacaccctagaagtattattggcctcctaaaggctggctaccatggagtcctgagatccagggatcccactggcagcaaagttcttatttacagaatcgcacactgggaccccaaagtttttacagcttatgacgtatttcgagtaagtctaatcacatccgagcttattgtacaggaggtagaaactcagcggaatggaatcaaggctatctttgatctggaaggttggcagttttctcatgcttttcaaatcactccatccgtagccaagaagattgctgctgtacttacggattcatttccattgaaagttcgtggcatccatttgataaatgaaccagtaattttccatgctgtcttttccatgatcaaaccattcctgactgaaaaaattaaggaacggattcacatgcatgggaacaactacaaacaaagcttgcttcagcatttcccagacattcttcctctggaatatggtggtgaagaattctccatggaggacatttgtcaggaatggacaaattttataatgaagtctgaagattatctcagcagcatttctgagagcattcaatgagaagttatgtcatgtgaatggcttcctaactaaaaatacatgagtgatatccaacctggttaaatgaatgaaagaaaaggagcaaatcttttaaactaatgcttgcctgaactttaaaaatgtagaaatcttctgacatgagcaacacaggtgtttggaaagattttttactttttaaatgcttttttctctacttttgaagtaattaaatgtcagtacattttaagagcataaaaatcggcgattttgtacttgaagagaacatgaaagttattgctaaagtagctgctcatgtgcatctttgtatgtttctagaaagttatattttaaacaagttctctgat

SEQ ID NO: 225 - protein, 479 aa, Homo sapiens
GCTTTATAAATTTACACTACCTTTTGAATATACAAACCTCATTCTTCATTAGACAACGTGAAGGCTTTGGGTTTTTTGAAGTTAAATTTGAAGGTGCAGTTTGCTTTGGCATTCCCTCAGCTCCAGATGTATTAACTACTGTGCTTGCAGAGGCCAGGACTAAGATTGTACTATGAAACTTACTGAGTAGTTTTCATAAATTATTATTCAATGGAGAGATTTTTAGATTTTTGTATTCTGCTTAGTTTAAAAAAACAAAACAACAAAGAGTAGTTACCATGAGGGGCTGGTACGTTGATGCTGTTGTTGCCAAACAAACTTAGGCGAATCCCTAACATAGCAGGTGTGGAGAGGATGACGCGTGGCTTTGATGAATGTTGGAAAGGAGCTTCTGCAGCCTTGACTGTACTGGGTCTGTGAAGGCGCACACGTGCCTTTGTAAATGTTCATTCTCGGCCTCATGAACCAGGTGATGAGTG

SEQ ID NO: 226 - DNA, 4827 bp, Homo sapiens
gcggtggcgctgcggagacccggtccagacgcctggcggccgccggcacacaaggcgctttctagctccctcccccgagcgcacagcccgcctccttccgcggcgcctgcagtggcaggcttgctctgccctaccgtgacgcgctccggagacgctctgcgggtcctggacaccgggtccgcggcgtggggacgacagacggaggcgaacgccatcggtagccggtccgcgagccatcgttcggggcgcagtcctctccccggctggccctcctttctccggggcattcgccaccgcttccctgggctgagacgaccggttcgtcgcctccttgcccgtgaccgtcgctagaactcagttgtgcgttgcggccagtcgccactgctgagtggaagcaaaatgtcagtcagtgtgcatgagaaccgcaagtccagggccagcagcggctccattaacatctatctgtttcacaagtcctcctacgctgacagcgtcctcactcacctgaatcttttacgccagcagcgtctcttcactgacgtccttctccatgccggaaataggaccttcccttgccaccgggcagtgctggctgcatgcagtcgctactttgaggccatgttcagtggtggcctgaaagagagccaggacagtgaggtcaactttgacaattccatccacccagaagtcttggagctgctgcttgactatgcgtactcctcccgggtcatcatcaatgaagaaaatgcagaatcgctcctggaagctggtgacatgctggagtttcaagacatccgggatgcatgtgcagagttcctggaaaagaacctgcatcccaccaactgcctgggcatgctgctgctgtctgatgcacaccagtgcaccaagctgtacgaactatcttggagaatgtgtctcagcaacttccaaaccatcaggaagaatgaagatttcctccagctgccccaggacatggtagtgcaactcttgtccagtgaagagctggagacagaggatgaaaggcttgtgtacgagtctgcaattaactggatcagctatgacctgaagaagcgctattgctacctcccagaactgttgcagacagtaaggctggcacttctgccagccatctatctcatggagaatgtggccatggaggaactcatcaccaagcagagaaagagtaaggaaattgtggaagaggccatcaggtgcaaactgaaaatcctgcagaatgacggtgtggtaaccagcctctgtgcccgacctcggaaaactggccatgccctcttccttctgggaggacagactttcatgtgtgacaagttgtatctggtagaccagaaggccaaagaaatcattcccaaggctgacattcccagcccaagaaaagagtttagtgcatgtgcgattggctgcaaagtgtacattactggggggcgggggtctgaaaatggggtctcgaaagatgtctgggtttatgataccctgcacgaggagtggtccaaggctgcccccatgctggtggccaggtttggccatggctctgctgaactgaagcactgcctgtatgtggttggggggcacacggccgcaactggctgcctcccggcctccccctcagtctctctaaagcaggtagaacattatgaccccacaatcaacaaatggaccatggtggccccactccgagaaggcgttagcaacgccgcagtagtgagtgccaaacttaagttatttgctttcggaggtaccagtgtcagtcatgacaagctccccaaagttcagtgttacgatcagtgtgaaaacaggtggactgtaccggccacctgtccccagccctggcgttacacagcagcagctgtgctggggaaccagatttttattatggggggtgatacagaattctctgcctgctctgcttataaattcaacagtgagacttaccagtggaccaaagtgggagatgtgacagcaaagcgcatgagctgccatgctgtggcctctggaaacaaactctacgtggttggaggatactttggcattcagcgatgcaagactttggactgctacgatccaacattagacgtgtggaacagcatcaccactgtcccgtactcgctgattcctactgcatttgtcagcacctggaaacatctgccttcttaaatgcagtacattctaaagagagtgagcatgagctcactccatcactcgatgagataatatgagatttctacttcggagaggccaagtctaatgaagagaaaaaaaggaaaagaagttgcaagactcgaataaaatctgctgcaccttgtaaatgctctaactggacatgaaggaaaggggcgagggaggggggtgggatttttggtgcaagtagcacatggtttaaatatgaatgaacaaacctgtgatctagtccttgtcttgtaattgtggattaatgtcaatgttaatcagcccctcaaagggagagaaaagctggaccttttcccttgctgtaccatattcagcatttgatttccatgggccccaccatttatgtgtagaatttgaaatggttgtcacctctctctgaggacagagcttgaagcctccacaccagctgctgctggagattcaaagcccaactgtgggtccgagagggaagctggctgggctggctgaagaatgaagaccactggactctccgttaatctctaaggggtctgctccccaggaacgtttctgaacaatggggactttgttggtagccatttggtagatgttcttttctatttataagtgactttaaactttcccttggctgttaagaagtttgttatagatttagctatttattgttcgatgcctgcatgctgaaacaatgcctacagctgtcttcacatgtatggacgtgtgtgaatggttgtacgttttgcacattttgtggctgttgagatgtgctttgctgcacaaacatgaaaatttttgagttacaatttggagcataactggagggtgggctggggaggggtggatttttaaaatgtcaagacagggaaggatgacaaaatggaaatttaaatgacatcctagaggtagagaaaccgtggagatcgcttttctcagactcaccaacttttaatgggatttcatggggtttggttgtgctgatagggtaaggggaggctgctttctgcccttctccccactcccatctgatttacttaattcagtctcagctgctgaaatttggaaaggaccaaattgctttacagtttttttctttgtgtagtatcttgaaatcctggaaaattctatggaatagttctgtatatagggcacaagtaaaggcattgtccaaagtttatttatttatttattaccctaagaatgctttgccataaccacatttaatgggaaaaacggcatgtatcacagatgtaaattaactcaccagatttactgggcctgaactcattctcttcttgctatatgatttagcaagttctagaaggtctccaagacaataattacattggcacaatgtatacttcagtgctcacccgtagcaaatctctttttaaaaaactctttggtgcacaagtaacacatttggccacaaaacaccaaagaattgtaggcagtggcccctattgagaagttttccggtagagttggaaatcagttgtgaatacattctttgctagttggagtgcttgtttactaagcatgtgccgtcgtaggtattagtgctagtctcaaataggtgcttcccctgaggtgcaggggaagaccaaagtttgcaactcgaactgctttcgtccatgtttctcacattgctgtattttagaaaataggggttaagactgataacaaccttttacattgtgactgtgtttgcattgtctaatgacagataaatccttaacatttctctccaccttagtactttagactaattgtgtttgtccgtccatgccatgaatgagtgggctgtagttgggcctaaataaatgagctgttggaagaaaagaatcacagtactttccagcagtcagtccctggttcctagatgtgttctaagcaatgcaaatgtctaattgtcccccagtgggcatagtcagtgtcgtttatattgtagcagttacagctctgtagtttatgatgcaaatctgccaagagagatgtatgtgtcactgcatggcttctgaaagcaggatgaattttctgcagctgtttcaaagttggggtctgttcttgaatcctctattaattactgtgtgtgagccagagggagctgtggtaagggttgggcccccagcctgtagggaactttctggactcccactctttgaatcgatataggcatttggtctcactacttgaccattctcaccctgtgaaacgtcccacactttgaagcaaatacaattcacagcacagtacacacaaaaaccttggcataagacagagaaggttcttcttattttgtgggctggttgctgtagaaacatataacaaagggcagccctccacttctggtataattgtgtagccccttttctttgggcttgacacctgtcttgaataagagtgattagagctgcataatgtccctctcttggctattgaccatgtggttcacgtacaaaactctgtataagttgaaggaaaatgttcatgttcatatgtacttgtttgctatgactacattttgaggttttgtaaaactgttatttttttttttttcacaatgtgaaactgaaggtcaataaattattagagattttctcttcaaaaaaaaaaaaaaaaaaaaaaaaaaaaaaaaaaaaaaaaaaa

SEQ ID NO: 227 - protein, 480 aa, Homo sapiens
CTACCATAAAACAATTAAGCACTAGCCATTAATTCAGTTGTCTGCAGAAAGAGTCTGGAATTCTCACTGAGATAGAAATTCATATTACAGACTACATTCCATGCCAAGAGCAAATTAATATACTATACTGATAAATGAGGATCCTTCAGACAAGATAATTTAACAAGGCCTAGAGAATTTTGGGGTCACTACATTATTCTTGAGGCGTGTCAAGAGTTAACAACCCTGGTGCTATTAACACTAAGTGTAAAACTCTTGCCTGGCAGAAGGTGCTATTCTCTAGTGTAAACATTTATCTGGTCCCTACAAATTCCCTTTGAAGTCACTCCCCTTGCATCTGTGCTAATCTCTAGTGTTAAACATTTATCTGGTTCCTTTTGAAGTCACTCCTTTTGCACCTGGAAAAATTCAATGTGCCTTATTCTGTTATGATTTGCAATTTACTCTGTATTATAAAAAGTCTGAGGCTCGACTGGAAAA

SEQ ID NO: 228 - protein, 105 aa, Homo sapiens
TTTATTATTTAAGCCTATTACTAAAACTTTATAAAATGCATTTGGCGAATACACCAGAGAAACCAGCTCATAAAATATGATCATTAACGAACTGCAAACCTCATC

SEQ ID NO: 229 - protein, 368 aa, Homo sapiens
GCTCGTCGCTGCCGTCGCTGGAAACCTGATCCCCCGCAGTCAACTTTGACAATGGCCAAGAACAAATTAAAAGGGCAGAAGTCCAGGAATGTATTTCATATAGCTAGCCACAAAACTTTCAAGGCTAAAAACAAGGCAAAACCAGTTACTACTAATCTTAAGAAGATAAACATTATGAATCATGAAAAAGTCAACAGAATGAACAGAGCTTTTGTAAATATACAGAAAGAACTTGCAAACTTCTCAAAAAGCCTTTCTCTTAAATCTGTGCAGAAAGAGCTGAAGCACCATGAAAATGAACCAGCTAACGTTGATGAAGCGACACGACTAATGGCTCAGTTGTAATACAGAGATAGTGCATCACATTC

SEQ ID NO: 230 - DNA, 2396 bp, Homo sapiens
gtgccgagactcaccactgccgcggccgctgggcctgagtgtcgccttcgccgccatggacgccaccgggcgctgacagacctatggagagtcagggtgtgcctcccgggccttatcgggccaccaagctgtggaatgaagttaccacatcttttcgagcaggaatgcctctaagaaaacacagacaacactttaaaaaatatggcaattgtttcacagcaggagaagcagtggattggctttatgacctattaagaaataatagcaattttggtcctgaagttacaaggcaacagactatccaactgttgaggaaatttcttaagaatcatgtaattgaagatatcaaagggaggtggggatcagaaaatgttgatgataacaaccagctcttcagatttcctgcaacttcgccacttaaaactctaccacgaaggtatccagaattgagaaaaaacaacatagagaacttttccaaagataaagatagcatttttaaattacgaaacttatctcgtagaactcctaaaaggcatggattacatttatctcaggaaaatggcgagaaaataaagcatgaaataatcaatgaagatcaagaaaatgcaattgataatagagaactaagccaggaagatgttgaagaagtttggagatatgttattctgatctacctgcaaaccattttaggtgtgccatccctagaagaagtcataaatccaaaacaagtaattccccaatatataatgtacaacatggccaatacaagtaaacgtggagtagttatactacaaaacaaatcagatgacctccctcactgggtattatctgccatgaagtgcctagcaaattggccaagaagcaatgatatgaatgatccaacttatgttggatttgaacgagatgtattcagaacaatcgcagattattttctagatctccctgaacctctacttacttttgaatattacgaattatttgtaaacattttggttgtttgtggctacatcacagtttcagatagatccagtgggatacataaaattcaagatgatccacagtcttcaaaattccttcacttaaacaatttgaattccttcaaatcaactgagtgccttcttctcagtctgcttcatagagaaaaaaacaaagaagaatcagattctactgagagactacagataagcaatccaggatttcaagaaagatgtgctaagaaaatgcagctagttaatttaagaaacagaagagtgagtgctaatgacataatgggaggaagttgtcataatttaatagggttaagtaatatgcatgatctatcctctaacagcaaaccaaggtgctgttctttggaaggaattgtagatgtgccagggaattcaagtaaagaggcatccagtgtctttcatcaatcttttccgaacatagaaggacaaaataataaactgtttttagagtctaagcccaaacaggaattcctgttgaatcttcattcagaggaaaatattcaaaagccattcagtgctggttttaagagaacctctactttgactgttcaagaccaagaggagttgtgtaatgggaaatgcaagtcaaaacagctttgtaggtctcagagtttgcttttaagaagtagtacaagaaggaatagttatatcaatacaccagtggctgaaattatcatgaaaccaaatgttggacaaggcagcacaagtgtgcaaacagctatggaaagtgaactcggagagtctagtgccacaatcaataaaagactctgcaaaagtacaatagaactttcagaaaattctttacttccagcttcttctatgttgactggcacacaaagcttgctgcaacctcatttagagagggttgccatcgatgctctacagttatgttgtttgttacttcccccaccaaatcgtagaaagcttcaacttttaatgcgtatgatttcccgaatgagtcaaaatgttgatatgcccaaacttcatgatgcaatgggtacgaggtcactgatgatacataccttttctcgatgtgtgttatgctgtgctgaagaagtggatcttgatgagcttcttgctggaagattagtttctttcttaatggatcatcatcaggaaattcttcaagtaccctcttacttactagactgctagtggataataacatcttgactacttaaaaaagggacatattgaaaatcctggagatggactatttgctcctttgcctaacttactcatactgtaagcagattagtgctcaggagtttgatgagcaaaaagtttctacctctcaagctgcaattgctagaactctttagaaaatattattaaaatacaggagtttaccttaaaggaaaaaaaaaaaacaaaaaaaaaaaaaaaaaa

SEQ ID NO: 231 - protein, 339 aa, Homo sapiens
TCTGGAAGTTTGTAAACACGCTCTTTCTCAGTAGAGGAGGAGCGCTTTTCTCCAGAAAGAGAAGAATTCCCCTGCTGCGTCTTCCCTCTTCTTAGAGCCTGTGCTGTGGACAAGACAGCATTCTCTGGCCATCAGCACAAGCAGAGGCGGCTCAAGTTCTAATTCTCAAAGGGCAGAAATGCTCGCAGGCGGCGGCTGTGGACCAGGCAGAAGCTGGGAAGTCATCAATTCCAAGCCAGATGAAAGATCCAGACTGAGCCAGTGCATTGCAGAATCATGGATGAATTTCAGCATGTTTCTTCAAGAAATGTCTCTTTTTAAACAGCAGAGTCCTGGCAA

SEQ ID NO: 232 - protein, 330 aa, Homo sapiens
CGGCACGAGGGGGCCTCTCAGTTTCTCTCTTGGGGAGAATCCTGGAGGTTCTTTGAGGTCTTTCAAGCTCTATTAGTTTGGCAGCTAGACAAACTGAGGGTTTGTGTCAGAAAAGGGGGTAGAGAATAGGGAAACAATGGCAACTTTTGCTAAGGTCAAAACAGGTCTCGGTTTATGTTGCATCCCCGGACCAAGACAGTGGCCTTCATCAGCATCTTCCCTCTCCTGAGAACAGCTGCCAGTCCATGAATCCTCAGAACACAACCTAGAGTATCTCAGGAACCAAGGAAGAATGGTCACTGAGACCGTCCCCACACCCTCGGTCCTTTG

SEQ ID NO: 233 - DNA, 3575 bp, Homo sapiens
cgggaggaggtcccccgacatgcctgaggcaaaaccagcggccaaaaaggcccccaaaggcaaagatgcccccaaaggagcccccaaggaggctccccctaaggaggctcctgcagaggcccccaaagaagccccacccgaggaccagtccccgactgcagaggagcccaccggcgttttcctgaagaagccggactccgtctcagtggagactgggaaggacgcagtggtcgtggccaaggtgaacgggaaggagctcccagacaaaccgaccatcaagtggttcaaggggaagtggctggagctgggcagcaagagtggcgcccgcttctccttcaaggagtcccacaactccgccagcaatgtgtacaccgtggagctgcacattgggaaggtggtactgggggaccgtgggtattaccgcctcgaggtcaaagccaaggacacctgtgacagctgtggcttcaacatcgatgtggaggcaccccgtcaggatgcctctgggcagagtctagaaagcttcaagcgtacgagtgaaaagaagtcggatactgcaggtgagctggatttcagtggcctgttgaagaagagggaggtggtggaggaggagaagaagaagaaaaagaaagatgacgatgacctaggcatccccccggagatttgggagctcctgaaaggggcaaagaagagcgagtacgagaaaatcgccttccagtatggcatcaccgacctccggggcatgctgaagcggctgaaaaaggctaaggtcgaggtcaagaagagtgcagcattcacaaagaagctggatccagcctaccaagtggacagaggcaacaagatcaagttgatggtagagatcagcgacccagacctgaccctcaagtggttcaagaacggccaggagatcaaaccaagcagcaagtacgtgtttgagaacgttggtaagaagcgaattcttaccatcaacaagtgcacgctggcggatgacgctgcctatgaagtagctgtcaaggatgagaagtgtttcaccgagctcttcgtcaaagaacctccagtcctaattgtcacacctcttgaggaccagcaggtgtttgtgggtgaccgggtggaaatggcagtggaggtgtcagaagagggtgcccaggtgatgtggatgaaagatggtgtggaactgactcgggaggattccttcaaggcccggtaccgcttcaagaaggacgggaagcgccacatcctcatcttctcagacgtggtccaggaggacaggggtcgctatcaggtcataaccaatggcggccagtgtgaggccgagctgattgtggaagagaaacagctggaggtcctgcaggacatcgcggatctgacggtgaaggcctcagaacaagctgtgttcaagtgcgaggtgtctgatgagaaagtgacgggcaagtggtataagaatggggtcgaggtgcggcccagcaagaggatcaccatttcccatgtaggcaggttccacaagctggtgatcgatgacgtccgccccgaggatgagggagactacacgtttgtgcctgacggctacgcccttggttcgctctcggccaagctcaacttcctggaaatcaaggtggagtacgttcccaagcaagagccaccaaagatccacttggattgctcggggaagacctcagagaatgcgattgtggttgtggctggaaacaagctgaggcttgacgtgtccatcacaggggagccccctcccgtcgctacctggctgaagggagatgaggtattcacgaccaccgagggcaggacccgcatcgagaagcgggtggactgcagcagctttgtgattgagagtgcgcagcgggaagacgagggccgctacaccatcaaggtcaccaaccccgtcggcgaggacgtggcttccatcttcctgcaagttgtagatgtcccagaccccccggaggctgtgcgcatcacctcggttggagaggattgggccatccttgtctgggagccaccaatgtacgatggggggaagccagtcaccgggtacctcgtagagcggaagaagaagggctctcagcgctggatgaagctgaactttgaggtcttcacagagaccacctatgagtccaccaagatgatcgagggcatcctctatgagatgcgtgtcttcgccgtcaatgctataggggtctcccagcccagcatgaacaccaagccttttatgcctattgcacccacgagtgaacccctgcacctgatagtggaggatgtgacagacaccaccaccacactcaagtggaggcctccgaacaggatcggggcaggtggcatcgatgggtacctggtggagtactgcctggaaggctccgaggaatgggtccctgccaacaccgagcccgtggagcgctgtggcttcaccgtcaagaatctcccgaccggagccagaatcctcttccgagtagttggggtcaacatcgcggggcgcacggagccggccaccctggcccagccggtcaccatcagggagattgcggagccacccaagatccggcttccccgccatctccgccagacctacatccgcaaagtgggcgagcagctcaaccttgtcgtccccttccagggaaagccccggccccaggtggtgtggaccaagggcggggccccgctggacacctcccgcgtgcacgtgcggaccagcgacttcgacaccgtgttcttcgtgcgccaggcggcccgctccgactccggggagtacgagctgagcgtgcagatcgagaacatgaaggacaccgccaccatccgcatccgcgttgtggaaaaggctgggccccccataaacgtgatggtgaaggaggtgtggggcacgaacgcgctggtggagtggcaggcccccaaagatgatgggaacagtgagatcatggggtatttcgtccagaaagcagacaaaaaaaccatggagtggttcaacgtctatgaacgtaacaggcacactagctgtactgtgtccgaccttatcgtgggcaatgaatactatttccgagtttacaccgagaacatctgtgggctcagtgactcacctggtgtctccaagaacacggcccgcatcctcaagacaggaatcaccttcaaaccgttcgagtataaggagcatgacttccggatggctcccaagttcctgacacctctcatagaccgcgtggtcgtggctgggtactcggcagccctcaactgtgctgtcagaggccacccgaagccgaaggtggtctggatgaagaacaagatggaaatccgtgaagatcccaagttcctgataaccaattaccaaggagtcctgacgctgaacatccgtcgcccctcgcccttcgacgctgggacttacacctgccgggccgtcaacgagctgggcgaggcgctggctgagtgcaagctggaggtccgagtgccgcagtgagacctgtcccctacctgccaagacaattggtggtggagtcctgaccccaatccccaacctcccaggactgtgttctttctggagttttcgctgagaacaaaacagtgttgtctggaaaaaaaaaaaa

SEQ ID NO: 234 - DNA, 5054 bp, Homo sapiens
atgggagacgtaaaagcgttgctgtttgtcgttgctgcccgggccagacgtttaggaggagccgctgcatccgagtccctggctgtctccgaagccttctgcagggtccgaagctgccagcccaaaaagtgtgcaggcccccagcggtgcctgaacccagtgcctgcagtgcccagtcccagccccagcgtgaggaagagacaggtgtccctcaactggcagccactgacgctccaggaggccagagctctactgaagcggcggcggccccgggggccagggggccggggactactgagaaggaggcccccacagcgtgcccccgctggcaaggccccggtcctgtgtcccttgatctgtcacaatggcggtgtgtgcgtgaagcctgaccgctgcttctgtcccccggacttcgctggcaagttctgccagttgcactcctcgggcgcccggcccccggccccggctgtaccaggcctcacccgctccgtgtacactatgccactggccaaccaccgcgacgacgagcacggcgtggcatctatggtgagcgtccacgtggagcacccgcaggaggcgtcggtggtggtgcaccaggtggagcgtgtgtctggcccttgggaggaggcggacgctgaggcggtggcgcgggcggaagcggcggcgcgggcggaggcggcagcgccctacacggtgttggcacagagcgcgccgcgggaggacggctactcagatgcctcgggcttcggttactgctttcgggagctgcgcggaggcgaatgcgcgtccccgctgcccgggctccggacgcaggaggtctgctgccgaggggccggcttggcctggggcgttcacgactgtcagctgtgctccgagcgcctggggaactccgaaagagtgagcgccccagatggaccttgtccaaccggctttgaaagagttaatgggtcctgcgaagatgtggatgagtgcgcgactggcgggcgctgccagcacggcgagtgtgcaaacacgcgcggcgggtacacgtgtgtgtgccccgacggctttctgctcgactcgtcccgcagcagctgcatctcccaacacgtgatctcagaggccaaagggccctgcttccgcgtgctccgcgacggcggctgttcgctgcccattctgcggaacatcactaaacagatctgctgctgcagccgcgtaggcaaggcctggggccggggctgccagctctgcccacccttcggctcagagggtttccgggagatctgcccggctggtcctggttaccactactcggcctccgacctccgctacaacaccagacccctgggccaggagccaccccgagtgtcactcagccagcctcgtaccctgccagccacctctcggccatctgcaggctttctgcccacccatcgcctggagccccggcctgaaccccggcccgatccccggcccggccctgagcttcccttgcccagcatccctgcctggactggtcctgagattcctgaatcaggtccctcctccggcatgtgtcagcgcaacccccaggtctgcggcccaggacgctgcatttcccggcccagcggctacacctgcgcttgcgactctggcttccggctcagcccccagggcacccgatgcattgatgtggacgaatgtcgccgcgtgcccccgccctgtgctcccgggcgctgcgagaactcaccaggcagcttccgctgcgtgtgcggcccgggcttccgagccggcccacgggctgcggaatgcctggatgtggacgagtgccaccgcgtgccgccgccgtgtgacctcgggcgctgcgagaacacgccaggcagcttcctgtgcgtgtgccccgccgggtaccaggctgcaccgcacggagccagctgccaggatgtggatgaatgcacccagagcccaggcctgtgtggccgagggggctgcaagaacctgcctggctctttccgctgtgtttgcccggctggcttccggggctcggcgtgtgaagaggatgtggatgagtgtgcccaggaaccgccgccctgtgggcccggccgctgtgacaacacggcaggctcctttcactgtgcctgccctgctggcttccgctcccgagggcccggggccccctgccaagatgtggatgagtgtgcccgaagccccccaccctgcacctacgggcggtgtgagaacacagaaggcagcttccagtgtgtctgccccatgggcttccaacccaacactgctggctccgagtgcgaagatgtggatgaatgtgaaaaccacctcgcatgccctgggcaggaatgtgtgaactcgcccggctccttccagtgcaggacctgtccttctggccaccacctgcaccgtggcagatgcactgatgtggacgaatgcagttcgggtgcccctccctgtggtccccacggccactgcactaacaccgaaggctccttccgctgcagctgcgcgccaggctaccgggcgccgtcgggtcggcccgggccctgcgcagacgtgaacgagtgcctggagggcgatttctgcttccctcacggcgagtgcctcaacactgacggctcctttgcctgtacttgtgcccctggctaccgacccggaccccgcggagcctcttgcctcgacgttgacgagtgcagcgaggaggacctttgccagagcggcatctgtaccaacaccgacggctccttcgagtgcatctgtcctccgggacaccgcgctggtccggacctcgcctcctgtctcgacgtggacgaatgtcgcgagcgaggtccagccctgtgcgggtcgcagcgttgtgagaactctcccggctcctaccgctgtgtccgggactgcgatcctgggtaccacgcgggccccgagggcacctgtgacgatgtggatgagtgccaagaatatggtcccgagatttgtggagcccagcgttgtgagaacacccctggctcctaccgctgtacaccagcctgtgaccctggctatcagcccacgccagggggcggatgccaggatgtggacgaatgccggaaccggtccttctgcggtgcccacgccgtgtgccagaacctgcccggctccttccagtgcctctgtgaccagggttacgagggggcacgggatgggcgtcactgcgtggatgtgaacgagtgtgaaacactacagggtgtatgtggagctgccctgtgtgaaaatgtcgaaggctccttcctctgtgtctgccccaacagcccggaagagtttgaccccatgactggacgctgtgttcccccacgaacttctgttggcatgtccccaggctcgcagccccaggcacctgttagccccgttctgcccgccaggccacctccgccacccctgtcccgccgacccagaaaacctaggaagggccctgtggggagtgggtgccgggagtgctattttgacacagcggccccggatgcatgtgacaacatcctggctcggaatgtgacatggcaggagtgctgctgtactgtgggtgagggctggggcagcggctgccgcatccagcagtgcccgggcaccgagacagctgagtaccagtcattgtgccctcacggccggggctacctggcgcccagtggagacctgagcctccggagagacgtggacgaatgtcagctcttccgagaccaggtgtgcaagagtggcgtgtgtgtgaacacggccccgggctactcatgctattgcagcaacggctactactaccacacacagcggctggagtgcatcgataatgacgagtgcgccgatgaggaaccggcctgtgagggcggccgctgtgtcaacactgtgggctcttatcactgtacctgcgagcccccactggtgctggatggctcgcagcgccgctgcgtctccaacgagagccagagcctcgatgacaatctgggagtgtgctggcaggaagtgggggctgacctcgtgtgcagccaccctcggctggaccgtcaggccacctacacagagtgctgctgcctgtatggagaggcctggggcatggactgcgccctctgccctgcgcaggactcagatgacttcgaggccctgtgcaatgtgctacgcccccccgcatatagccccccgcgaccaggtggctttggactcccctacgagtacggcccagacttaggtccaccttaccagggcctcccatatgggcctgagttgtacccaccacctgcgctaccctacgacccctacccaccgccacctgggcccttcgcccgccgggaggctccttatggggcaccccgcttcgacatgccagactttgaggacgatggtggcccctatggcgaatctgaggctcctgcgccacctggcccgggcacccgctggccctatcggtcccgggacacccgccgctccttcccagagcccgaggagcctcctgaaggtggaagctatgctggttccctggctgagccctacgaggagctggaggcggaggagtgcgggatcctggacggctgcaccaacgaccgctgcgtgcgcgtccccgaaggcttcacctgccgttgcttcgacggctaccgcctggacatgacccgcatggcctgcgttgacatcaacgagtgtgatgaggccgaggctgcctccccgctgtgcgtcaacgcgcgttgcctcaacacggatggctccttccgctgcatctgccgcccgggattcgcacccacgcaccagccgcaccactgtgcgcccgcacggccccgggcctgagccctggcacccgctggccacccacccgcgcccgccactcggggcccctgccgcgcatcctgcagcccgcttatgcgtatgtgcacggggccgcccgcctggacctggagaagggacctacggacgcctggaagctgcgacgccctgcactgctcccgcctccaccagcgcctcccactgatgtcgtggtcccgggcctggcccaggggcccctttacatgccctctcccttttataaaattttccattaaaaaccacctattttctaaaaaaaaaaaaaaaaaaaaaaa

SEQ ID NO: 235 - DNA, 7137 bp, Homo sapiens
cggccaggtgtgtgggactgaagttcttggagaagggagtccaactcttcaaggtgaactatgaccactttactctgggttttcgtgactctgagggtcatcactgcagctgtcactgtagaaacttcagaccatgacaactcgctgagtgtcagcatcccccaaccgtccccgctgagggtcctcctggggacctccctcaccatcccctgctatttcatcgaccccatgcaccctgtgaccaccgccccttctaccgccccactggccccaagaatcaagtggagccgtgtgtccaaggagaaggaggtagtgctgctggtggccactgaagggcgcgtgcgggtcaacagtgcctatcaggacaaggtctcactgcccaactacccggccatccccagtgacgccaccttggaagtccagagcctgcgctccaatgactctggggtctaccgctgcgaggtgatgcatggcatcgaggacagcgaggccaccctggaagtcgtggtgaaaggcatcgtgttccattacagagccatctctacacgctacaccctcgactttgacagggcgcagcgggcctgcctgcagaacagtgccatcattgccacgcctgagcagctgcaggccgcctacgaagacggcttccaccagtgtgacgccggctggctggctgaccagactgtcagataccccatccacactccccgggaaggctgctatggagacaaggatgagtttcctggtgtgaggacgtatggcatccgagacaccaacgagacctatgatgtgtactgcttcgccgaggagatggagggtgaggtcttttatgcaacatctccagagaagttcaccttccaggaagcagccaatgagtgccggcggctgggtgcccggctggccaccacgggccacgtctacctggcctggcaggctggcatggacatgtgcagcgccggctggctggccgaccgcagcgtgcgctaccccatctccaaggcccggcccaactgcggtggcaacctcctgggcgtgaggaccgtctacgtgcatgccaaccagacgggctaccccgacccctcatcccgctacgacgccatctgctacacaggtgaagactttgtggacatcccagaaaacttctttggagtggggggtgaggaggacatcaccgtccagacagtgacctggcctgacatggagctgccactgcctcgaaacatcactgagggtgaagcccgaggcagcgtgatccttaccgtaaagcccatcttcgaggtctcccccagtcccctggaacccgaggagcccttcacgtttgcccctgaaataggggccactgccttcgctgaggttgagaatgagactggagaggccaccaggccctggggctttcccacacctggcctgggccctgccacggcattcaccagtgaggacctcgtcgtgcaggtgaccgctgtccctgggcagccgcatttgccagggggggtcgtcttccactaccgcccgggacccacccgctactcgctgacctttgaggaggcacagcaggcctgccctggcacgggggcggtcattgcctcgccggagcagctccaggccgcctacgaagcaggctatgagcagtgtgacgccggctggctgcgggaccagaccgtcagataccccattgtgagcccacggaccccatgcgtgggtgacaaggacagcagcccaggggtcaggacctatggcgtgcgcccatcaacagagacctacgatgtctactgctttgtagacagacttgagggggaggtgttcttcgccacacgccttgagcagttcaccttccaggaagcactggagttctgtgaatctcacaatgccactgccaccacgggccagctctacgccgcctggagccgcggcctggacaagtgctatgccggctggctggccgacggcagcctccgctaccccatcgtcaccccaaggcctgcctgcggtggggacaagccaggcgtgagaacggtctacctctaccctaaccagacgggcctcccagacccactgtcccggcaccatgccttctgcttccgaggcatttcagcggttccttctccaggagaagaagagggtggcacacccacatcaccctctggtgtggaggagtggatcgtgacccaagtggttcctggtgtggctgctgtccccgtagaagaggagacaactgctgtaccctcaggggagactactgccatcctagagttcaccaccgagccagaaaaccagacagaatgggaaccagcctataccccagtgggcacatccccgctgccagggatccttcctacttggcctcctactggcgccgaaacagaggaaagtacagaaggcccttctgcaactgaagtgccctctgcctcagaggaaccatccccctcagaggtgccattcccctcagaggagccatccccctcagaggaaccattcccctcagtgaggccattcccctcagtggagctgttcccctcagaggagccattcccctccaaggagccatccccctcagaggaaccatcagcctcagaagagccgtatacaccttcaccccccgagcccagctggactgagctgcccagctctggggaggaatctggggcccctgatgtcagtggtgacttcacaggcagtggagatgtttcaggacaccttgacttcagtgggcagctgtcaggggacagggcaagtggactgccctctggagacctggactccagtggtcttacttccacagtgggctcaggcctgactgtggaaagtggactaccctcaggggatgaagagagaattgagtggcccagcactcctacggttggtgaactgccctctggagctgagatcctagagggctctgcctctggagttggggatctcagtggacttccttctggagaagttctagagacctctgcctctggagtaggagacctcagtgggcttccttctggagaagttctagagaccactgcccctggagtagaggacatcagcgggcttccttctggagaagttctagagaccactgcccctggagtagaggacatcagcgggcttccttctggagaagttctagagaccactgcccctggagtagaggacatcagcgggcttccttctggagaagttctagagaccactgcccctggagtagaggacatcagcgggcttccttctggagaagttctagagaccactgcccctggagtagaggacatcagcgggcttccttctggagaagttctagagaccgctgcccctggagtagaggacatcagcgggcttccttctggagaagttctagagaccgctgcccctggagtagaggacatcagcgggcttccttctggagaagttctagagaccgctgcccctggagtagaggacatcagcgggcttccttctggagaagttctagagaccgctgcccctggagtagaggacatcagcgggcttccttctggagaagttctagagaccgctgcccctggagtagaggacatcagcgggcttccttctggagaagttctagagaccgctgcccctggagtagaggacatcagcgggcttccttctggagaagttctagagaccgctgcccctggagtagaggacatcagcgggcttccttctggagaagttctagagactgctgcccctggagtagaggacatcagcgggcttccttctggagaagttctagagactgctgcccctggagtagaggacatcagcgggcttccttctggagaagttctagagactgctgcccctggagtagaggacatcagcgggcttccttctggagaagttctagagactgctgcccctggagtagaggacatcagcgggcttccttctggagaagttctagagactactgcccctggagtagaggagatcagcgggcttccttctggagaagttctagagactactgcccctggagtagatgagatcagtgggcttccttctggagaagttctagagactactgcccctggagtagaggagatcagcgggcttccttctggagaagttctagagacttctacctctgcggtaggggacctcagtggacttccttctggaggagaagttctagagatttctgtctctggagtagaggacatcagtgggcttccttctggagaggttgtagagacttctgcctctggaatagaggatgtcagtgaacttccttcaggagaaggtctagagacctctgcttctggagtagaggacctcagcaggctcccttctggagaagaagttctagagatttctgcctctggatttggggacctcagtggagttccttctggaggagaaggtctagagacctctgcttctgaagtagggactgacctcagtgggcttccttctggaagggagggtctagagacttcagcttctggagctgaggacctcagtgggttgccttctggaaaagaagacttggtggggtcagcttctggagacttggacttgggcaaactgccttctggaactctaggaagtgggcaagctccagaaacaagtggtcttccctctggatttagtggtgagtattctggggtggaccttggaagtggcccaccctctggcctgcctgactttagtggacttccatctggattcccaactgtttccctagtggattctacattggtggaagtggtcacagcctccactgcaagtgaactggaagggaggggaaccattggcatcagtggtgcaggagaaatatctggactgccctccagtgagctggacattagtgggagagctagtggactcccttcaggaactgaactcagtggccaagcatctgggtctcctgatgtcagtggggaaatacctggactctttggtgtcagtggacagccatcagggtttcctgacactagtggggaaacatctggagtgactgagcttagcgggctgtcctctggacaaccaggtgttagtggagaagcatctggagttctttatggcactagtcaaccctttggcataactgatctgagtggagaaacatctggggtccctgatctcagtgggcagccttcagggttaccagggttcagtggggcaacatcaggagtccctgacctggtttctggtaccacgagtggcagcggtgaatcttctgggattacatttgtggacaccagtttggttgaagtggcccctactacatttaaagaagaagaaggcttagggtctgtggaactcagtggcctcccttccggagaggcagatctgtcaggcaaatctgggatggtggatgtcagtggacagttttctggaacagtcgattccagtgggtttacatcccagactccggaattcagtggcctaccaagtggcatagctgaggtcagtggagaatcctccagagctgagattgggagcagcctgccctcgggagcatattatggcagtggaactccatctagtttccccacggtctctcttgtagacagaactttggtggaatctgtaacccaggctccaacagcccaagaggcaggagaagggccttctggcattttagaactcagtggtgctcattctggagcaccagacatgtctggggagcattctggatttctggacctaagtgggctgcagtccgggctgatagagcccagcggagagccaccaggtactccatattttagtggggattttgccagcaccaccaatgtaagtggagaatcctctgtagccatgggcaccagtggagaggcctcaggacttccagaagttactttaatcacttctgagttcgtggagggtgttactgaaccaactatttctcaggaactaggccaaaggccccctgtgacacacacaccccagctttttgagtccagtggaaaagtctccacagctggggacattagtggagctaccccagtgctccctgggtctggagtagaagtatcatcagtcccagaatctagcagtgagacgtccgcctatcctgaagctgggttcggggcatctgccgcccctgaggccagcagagaagattctgggtcccctgatctgagtgaaaccacctctgcattccacgaagctaaccttgagagatcctctggcctaggagtgagcggcagcactttgacatttcaagaaggcgaggcgtccgctgccccagaagtgagtggagaatccaccaccaccagtgatgtggggacagaggcaccaggcttgccttcagccactcccacggcttctggagacaggactgaaatcagcggagacctgtctggtcacacctcgcagctgggcgttgtcatcagcaccagcatcccagagtctgagtggacccagcagacccagcgccctgcagagacgcatctagaaattgagtcctcaagcctcctgtactcaggagaagagactcacacagtcgaaacagccacctccccaacagatgcttccatcccagcttctccggaatggaaacgtgaatcagaatcaactgctgcagaccaggaggtatgtgaggagggctggaacaagtaccagggccactgttaccgccacttcccggaccgcgagacctgggtggatgctgagcgccggtgtcgggagcagcagtcacacctgagcagcatcgtcacccccgaggagcaggagtttgtcaacaacaatgcccaagactaccagtggatcggcctgaacgacaggaccatcgaaggggacttccgctggtcagatggacaccccatgcaatttgagaactggcgccccaaccagcctgacaacttttttgccgctggagaggactgtgtggtgatgatctggcacgagaagggcgagtggaatgatgttccctgcaattaccacctccccttcacgtgtaaaaagggcacagccaccacctacaaacgcagactacagaagcggagctcacggcaccctcggaggagccgccccagcacagcccactgagaagagcttccaggacgcacccaggacgctgagcccaggagcctgccaggctgacgtgcatcccacccagacggtgtcctcttcttgtcgctttttgtcatataaggaatcccattaaaaaaaaaa

SEQ ID NO: 236 - protein, 400 aa, Homo sapiens
CTGAGAACCCACAGGCTGACCACCAAATTGTTCTGGATGTATTGCATCTGAAACTCTTGCAGAATTGAAAATTGTCAAAATCTTGAAGAATATTTTCTTTAGAACAATCTGTAATCCTATTCTTCCTGCTTGGTGACCAACTTTTATCTTCTGTTTACTTAAAGCTTTTCTAACATCAAAGACACCAGCCCACAGCTGAGAGACATTCTTCAGATGTCATCAGAGAAAAATGGAAGTTCCTTAACCAACTTCTGGCTGCTAAGAAATAGGCCAGACCATTCTACACTTTTCCACTGGATCCTTTCCTTATTTTTTTTGGATCATAATTCGTTTGCCTGCTGGCCATTCCATTATATCTGTAGCATTGTGACTTCTGATGTTTCTTAATAAAGCTTATATC

SEQ ID NO: 237 - DNA, 846 bp, Homo sapiens
ccacgtccggggtgccgagccaactttcctgcgtccatgcagccccgccggcaacggctgcccgctccctggtccgggcccaggggcccgcgccccaccgccccgctgctcgcgctgctgctgttgctcgccccggtggcggcgcccgcggggtccgggggccccgacgaccctgggcagcctcaggatgctggggtcccgcgcaggctcctgcagcagaaggcgcgcgcggcgcttcacttcttcaacttccggtccggctcgcccagcgcgctgcgagtgctggccgaggtgcaggagggccgcgcgtggattaatccaaaagagggatgtaaagttcacgtggtcttcagcacagagcgctacaacccagagtctttacttcaggaaggtgagggacgtttggggaaatgttctgctcgagtgtttttcaagaatcagaaacccagaccaaccatcaatgtaacttgtacacggctcatcgagaaaaagaaaagacaacaagaggattacctgctttacaagcaaatgaagcaactgaaaaaccccttggaaatagtcagcatacctgataatcatggacatattgatccctctctgagactcatctgggatttggctttccttggaagctcttacgtgatgtgggaaatgacaacacaggtgtcacactactacttggcacagctcactagtgtgaggcagtgggtaagaaaaacctgaaaattaacttgtgccacaagagttacaatcaaagtggtctccttagactgaattcatgtgaacttctaatttcatatcaagagttgtaatcacatttatttcaataaatatgtgagttcctgc

SEQ ID NO: 238 - protein, 573 aa, Homo sapiens
GCTCACGCAGCAGGATCTGGATACGACAGACTCCTCCAGCTTCAAGACACTTAACCAAGAAGAAGGATGGCCAGTGCCTTCTCAAAGTTGCTAACTGGCCGAAATGCATCTCTGCTGTTTACTACACTGGGAACCAGTGCCCTGACCACTGGTTACCTGCTGAATAGGCAGAAGGTATCTGCTGATGCCCGGGAACAGCACAAGCTCTTTCCCCCAAGTGCGGACTACCCTGACCTTCGAAAACATAACAACTGCATGGCTGAGTGCCTCACCCCCACCATCTATGCCAAACTCCGAAACAAGATGACACCCAGTGGCTATACCCTGGACCAGTGCATCCAAACTGGAGTGGACAACCCCGGCCACCCCTTCATTAAGACTGTGGGCATGGTGGCTGGTGATGAGGAGTCGTATGAGGTATTTGCTGACCTTTTTGATCCTGTCATCAAACTAAGGCACAATGGCTATGACCCTAGGGTGATGAAGCATCTACGGACCTGGATGCATCAAGATTCTCACGGGCAGTTTGATGAGCGTATGTGTTGTCTCTCGGGTACCACTGGCGAACATCCG

SEQ ID NO: 239 - protein, 462 aa, Homo sapiens
AAAACATTCAAAAGTCAGAGGTCATTGAGTTTGTAACTGTAGATGCCTTTGCGGATGTTTCCATCCTGGGAGAGACTTCCAGCACCGTAGTATTGGGTTGTCAGGAGATGGGCCCCAAATTAACTGCCAGAGCAGGCAGAAAGGGATGCTGCGTTCAGCCATTCCACACTTACTTCCAGAGCTCTTGTGTTGTGTGTATTGCAAGCCTGGCCAGAACTACTTCAAAGGCCCCTTTACCTAAACCATTGTAGAAGCCAGGCCTCCCTTGGTTGAAGACATATTTAATCCCCAAATTCTTCCGTGATGGGTGTTTTTCCCAGCAGGAGAGGGCACTGATCAGACAGATTTTGTTCCTGCATCCTGTACATAATGTTTTGAGTGTCAGGTCCAGGGATGAGAGACCGTTGCTCTTCCCATTGTTTCTCTCCTGGTTTTGTAAATGATTCTCAATCGACATATGAG

SEQ ID NO: 240 - DNA, 1597 bp, Homo sapiens
ggctccggcttcaagatcaaaggaaatgtttccctttgtcccgtttcacactaaacgggttggggaggaaccaggggagatgtcaaccgtctgccggtgactgggaagttttctgcaagtcctccacagcatagccagcaggccacttttcactaacagaagtcacaagccaagtgagacactcatccaagaggaaggatggccagtatcttttctaagttgctaactggccgcaatgcttctctgctgtttgctaccatgggcaccagtgtcctgaccaccgggtacctgctgaaccggcagaaagtgtgtgccgaggtccgggagcagcctaggctatttcctccaagcgcagactacccagacctgcgcaagcacaacaactgcatggccgagtgcctcacccccgccatttattccaagcttcgcaacaaggtgacacccaacggctacacgctggaccagtgcatccagactggagtggacaaccctggccaccccttcataaagactgtgggcatggtggctggtgacgaggagtcctatgaggtgtttgctgacctttttgaccccgtcatcaaactaagacacaacggctatgaccccagggtgatgaagcacacaacggatctggatgcatcaaagatcacccaagggcagttcgacgagcattacgtgctgtcttctcgggtgcgcactggccgcagcatccgtgggctgagcctgcctccagcctgcacccgggccgagcgaagggaggtagagaacgtggccatcactgccctggagggcctcaagggggacctggctggccgctactacaagctgtccgagatgacggagcaggaccagcagcggctcatcgatgaccactttctgtttgataagccagtgtcccctttattaacatgtgctgggatggcccgtgactggccagatgccaggggaatctggcataattatgataagacatttctcatctggataaatgaggaggatcacaccagggtaatctcaatggaaaaaggaggcaatatgaaacgagtatttgagcgattctgtcgtggactaaaagaagtagaacggttaatccaagaacgaggctgggagttcatgtggaatgagcgcctaggatacattttgacctgtccttcgaaccttggaacaggactacgagctggtgtccacgttaggatcccaaagctcagcaaggacccacgcttttctaagatcctggaaaacctaagactccagaagcgtggcacaggtggtgtggacactgccgcggtcgcagatgtgtacgacatttccaacatagatagaattggtcgatcagaggttgagcttgttcagatagtcatcgatggagtcaattacctggtggattgtgaaaagaagttggagagaggccaagatattaaggtgccaccccctctgcctcagtttggcaaaaagtaaactttccctttcccaatttataaataatctgtctgctggtacaacagacataaatctctactctgagagtttttatacacttggaaaaatataaaattgtagatcctgcctatctttacaataaaactctccttaatat

SEQ ID NO: 241 - protein, 430 aa, Homo sapiens
ATTTGGTACAGAATTTTGAATGACAGTGAAAATTGTTGTCTTTGCAAAGCACAAAACTAACCTGGAAAGGCGTTTCGGCTCAGGTAGCTACCCAGAATGTGTGTGATTGGTGTGTCTCCGCTGTCTGCAGAGAAAGCAGCTGCCCAAACTACTATTTACATTCCCAGATACTGAGAGCAAATAGCTTTTCATGGCCTTGCATATTTGGGGGCCCTTTTCTCTGTCCCGACCCCAGGTGCGGATGGAACTAGAAATGATTCTTCTGTGAGAAAAGAGTCCTGGACACGGAGTAGTGTGTTTCACAACTGCGGTGGAACACAAGTAGATTCCCAAGTCACTGCTGTGTGAGGACTGAGTGAGGTTTTGAAAAATTCTGTCTTGAGTCCATGTTATCTTGATTTTTAAAATTGATAGGGAAGAAACCCCACAA

SEQ ID NO: 242 - protein, 491 aa, Homo sapiens
TTCGGATCAACGGGGAGATGGGGTAAGAGTTGAGCAGCGATCCTAAGTTGAGGGAAGATGGGGAAAGAGTGGAAGATCCATTGGGTTTTTCAAGTGCCGCAAGGACACAGGCTGATAATAGCCTTGTACAAAAATGTCAGATAAGCCAGAATTTTAGCTAGTAAGCTACGCAAATACTAATACAGTTTCACTATGCTGTTTGGGATCATTTAGGAGTGGTGGTGTGCTTTCTTCATTATACATTTCAAATACTGTTCAGTATTAAGCATCTGTGAAATTAACTTCTAGTACAAACATGTAGCTTCCATAATCTGTCTTTGTTATCAATGTAAGTGGTGCAGTTAGAAGGAATCATCTGAACTCGTCGGAGCGAGGAAAGGATAGCTGAGAGAACTGTGGAGTGCTAGGGTGTAGGCGAGCAGCAGTGGACCATGGGTCGGATGCAGCCAGCTCTGGCTTCCTGTGTGGACAGTGCCTTTCCCAAGGTGACC

SEQ ID NO: 243 - protein, 623 aa, Homo sapiens
GCAGGCAGCCTAGGCCTGGGACTGGAACAGCGCGGAGATGGGGGCGGCGGCCGCAGAGGGACCGACTCTGTTCGTGGGTAACCAGGAGACGAAGGTGACGGAGGAGCTCCTCTTCGAGCTGTTCCACCAGGCTGGGCCGGTAATAAAAGTGAAAATCCCGAAAGATAAAGATGGCAAACTGAAGCAGTTTGCATTCGTGAACTTCAAACATGAAGTGTCTGTTCCCTATGCCATGAATCTGCTCAACGGAATCAAACTTTTCGGGAGGCCTATCAAAATTCAGTTTAGATCAGGAAGCAGTCACGCCTCTCAGGATGCCAGTGTGTCATATCCCCAGCATCATGTTGGAAATTTAAGCCCAACCTCCACATCTCCTAACAGCTATGAAAGGACAGTGGGTAACGTGTCTCCGACAGCACAGATGGTCCAGAGGTCCTTTTCTTCTCCAGAAGATTATCAACGGCAAGCAGTGATGAACAGTGTTTTCAGACAGATGTCATATGCTGGGAAATTTGGTTCTCCACATGCGGATCAGTTGGGATTTTCCCATCAGCTCAGCACATGGCATACTTTAGCAGTCTTCAGCTCCAGTGGCGCCAAATGCACGTCATCACAGCTAAAGA

SEQ ID NO: 244 - DNA, 183 bp, Homo sapiens
atggatgcagtcagccaagtccccatggaagtcgtgcttcccaagcacatcctggatatctgggttattgtcctcatcatcctggccaccattgtcatcatgacctcgttgttgctgtgcccagccactgcagtaatcatctatcgcatgcggactcatccgatccttagtggggctgtttga

SEQ ID NO: 245 - DNA, 1228 bp, Homo sapiens
ctctttgccctcgcgacgccgccacctccggaacaagccatggtggcggcgacggtggcagcggcgtggctgctcctgtgggctgcggcctgcgcgcagcaggagcaggacttctacgacttcaaggcggtcaacatccggggcaaactggtgtcgctggagaagtaccgcggatcggtgtccctggtggtgaatgtggccagcgagtgcggcttcacagaccagcactaccgagccctgcagcagctgcagcgagacctgggcccccaccactttaacgtgctcgccttcccctgcaaccagtttggccaacaggagcctgacagcaacaaggagattgagagctttgcccgccgcacctacagtgtctcattccccatgtttagcaagattgcagtcaccggtactggtgcccatcctgccttcaagtacctggcccagacttctgggaaggagcccacctggaacttctggaagtacctagtagccccagatggaaaggtggtaggggcttgggacccaactgtgtcagtggaggaggtcagaccccagatcacagcgctcgtgaggaagctcatcctactgaagcgagaagacttataaccaccgcgtctcctcctccaccacctcatcccgcccacctgtgtggggctgaccaatgcaaactcaaatggtgcttcaaagggagagacccactgactctccttcctttactcttatgccattggtcccatcattcttgtgggggaaaaattctagtattttgattatttgaatcttacagcaacaaataggaactcctggccaatgagagctcttgaccagtgaatcaccagccgatacgaacgtcttgccaacaaaaatgtgtggcaaatagaagtatatcaagcaataatctcccacccaaggcttctgtaaactgggaccaatgattacctcatagggctgttgtgaggattaggatgaaatacctgtgaaagtgcctaggcagtgccagccaaataggaggcattcaatgaacattttttgcatataaaccaaaaaataacttgttatcaataaaaacttgcatccaacatgaatttccagccgatgataatccaggccaaaggtttagttgttgttatttcctctgtattattttcttcattacaaaagaaatgcaagttcattgtaacaatccaaacaatacctcacgatataaaataaaaatgaaagtatcctcctc

SEQ ID NO: 246 - DNA, 2165 bp, Homo sapiens
ggcggctgagaggcgggcgggccgggggcgccgggcgcggggccgccatgtggagcggccgcagctccttcaccagcttggtggtgggcgtgttcgtggtctacgtggtgcacacctgctgggtcatgtacggcatcgtctacacccgcccgtgctccggcgacgccaactgcatccagccctacctggcgcggcggcccaagctgcagctgagcgtgtacaccacgacgaggtcccacctgggtgctgagaacaacatcgacctggtcttgaatgtggaagactttgatgtggagtccaaatttgaaaggacagttaatgtttctgtaccaaagaaaacgagaaacaatgggacgctgtatgcctacatcttcctccatcacgctggggtcctgccgtggcacgacgggaagcaggtgcacctggtcagtcctctgaccacctacatggtccccaagccagaagaaatcaacctgctcaccggggagtctgatacacagcagatcgaggcggagaagaagccgacgagtgccctggatgagccagtgtcccactggcgaccgcggctggcgctgaacgtgatggcggacaactttgtctttgacgggtcctccctgcctgccgatgtgcatcggtacatgaagatgatccagctggggaaaaccgtgcattacctgcccatcctgttcatcgaccagctcagcaaccgcgtgaaggacctgatggtcataaaccgctccaccaccgagctgcccctcaccgtgtcctacgacaaggtctcactggggcggctgcgcttctggatccacatgcaggacgccgtgtactccctgcagcagttcgggttttcagagaaagatgctgatgaggtgaaaggaatttttgtagataccaacttatacttcctggcgctgaccttctttgtcgcagcgttccatcttctctttgatttcctggcctttaaaaatgacatcagtttctggaagaagaagaagagcatgatcggcatgtccaccaaggcagtgctctggcgctgcttcagcaccgtggtcatctttctgttcctgctggacgagcagacgagcctgctggtgctggtcccggcgggtgttggagccgccattgagctgtggaaagtgaagaaggcattgaagatgactattttttggagaggcctgatgcccgaatttcagtttggcacttacagcgaatctgagaggaaaaccgaggagtacgatactcaggccatgaagtacttgtcatacctgctgtaccctctctgtgtcgggggtgctgtctattcactcctgaatatcaaatataagagctggtactcctggttaatcaacagcttcgtcaacggggtctatgcctttggtttcctcttcatgctgccccagctctttgtgaactacaagttgaagtcagtggcacatctgccctggaaggccttcacctacaaggctttcaacaccttcattgatgacgtctttgccttcatcatcaccatgcccacgtctcaccggctggcctgcttccgggacgacgtggtgtttctggtctacctgtaccagcggtggctttatcctgtggataaacgcagagtgaacgagtttggggagtcctacgaggagaaggccacgcgggcgccccacacggactgaaggccgcccgggctgccgccagccaagtgcaacttgaattgtcaatgagtatttttggaagcatttggaggaattcctagacattgcgttttctgtgttgccaaaatcccttcggacatttctcagacatctcccaagttcccatcacgtcagatttggagctggtagcgcttacgatgcccccacgtgtgaacatctgtcttggtcacagagctgggtgctgccggtcaccttgagctgtggtggctcccggcacacgagtgtccggggttcggccatgtcctcacgcgggcaggggtgggagccctcacaggcaagggggctgttggatttccatttcaggtggttttctaagtgctccttatgtgaatttcaaacacgtatggaattcattccgcatggactctgggatcaaaggctctttcctcttttgtttgagagttggttgttttaaagcttaatgtatgtttctattttaaaataaaaaaaaaaaaaaaaaaa

SEQ ID NO: 247 - protein, 441 aa, Homo sapiens
CAGTAGGAAAAGTATTCAGACTACTTGATTATTTCCTAGATGATTCCATGTTTTTATTGCAACTTGAAACTTCTGTTTCTGTATAGAAATGCACAGACTTCATGGCAATAAGGACGAAGGTCAAAAACCACAGAATAGCTTGTGAGGGGTGGGGGTGTTGTGTGTGTGTGACAGCAGGTCTCCTTGGGCCTGTGAGAGCTGGAGACCCAGCAAAGAGAGTGAGTTGATAGTAACTTGGCTTCATTCTGCGCACAGGCTGCAGTGACCTCTAGAGCTTCTATCCTACTTGTCTTTGTATCAAAACTTGAATTTTTCCTCATCCTGTCAGGATAAAAGACTCCTCTACTCGGGAAGTGCCTGCTTTTCATGTGGTCCTCAGATCTAGTCAGCTCTGGCTGCCTCCTCAGATGTACATGACTATCCAGGGATTCTTGGACACTT

SEQ ID NO: 248 - DNA, 1731 bp, Homo sapiens
aaaacaactacggctgcggtgtggttggtggtgagatgacgaccttagtgctggataatggagcttacaacgccaaaatcggttacagccatgaaaatgtgtcggttattcctaattgtcagttccggtcaaaaacagcacgtcttaaaacttttactgccaaccagatagatgaaataaaagacccttctggactcttttacatcctcccttttcaaaagggctacttggtgaattgggatgttcagagacaagtttgggattacctttttggaaaagaaatgtatcaggttgattttttagatactaatattattatcactgaaccatactttaacttcacttcaattcaagaatcaatgaatgaaattctatttgaagaataccagtttcaagcagtattaagagtaaatgctggggctctcagtgcacataggtatttccgagataatccttccgaattatgctgtatcattgttgatagtggatattcctttacacatatagttccttattgtagaagtaaaaagaaaaaagaagcaattattcggataaatgtgggaggaaaactcttaaccaatcatctaaaggagatcatatcttacaggcagctacatgttatggatgaaacacatgtgattaatcaagtgaaagaagatgtatgctatgtgtctcaggatttttatagagacatggatattgcaaagttgaaaggagaagaaaatacagtaatgatagactatgtcttgcctgacttcagtacaattaaaaagggcttttgtaagccaagggaagagatggtgttgagtggaaaatacaaatctggggaacaaattcttcgtttggccaatgagagatttgctgttccggaaatactctttaatccttctgatataggcattcaagaaatgggaattccagaagctattgtctattcaattcaaaatctacctgaagaaatgcagccgcatttttttaagaacattgtcttgacaggaggaaattcccttttcccaggatttagggatcgggtttactcagaagttcgatgtcttactccaacagattatgatgtttctgttgtgctgcctgaaaaccctattacttatgcctgggaaggtggaaaattgatatcagagaatgatgattttgaagatatggtggtaacaagagaagattacgaagaaaatggacatagcgtctgtgaagagaaatttgatatttaagcaacatttttgaatgaaagttgtgaccataaggtttaatttcaaagttccttttaaaagaggttaaggaactgtgttaccttttgtcctaagaaaaaggcttgaatttatgtaaatactttgatcgattgctaattttcaaaggcttcttaggtaggttactacagtaaactgtaactcagtccacattttcatttaggagctagactaccataacaatgcttatgctgtttccaagggtaggttatttttcattaaaagaagaatgaatgcattttaagtttaattcttcatagctgaaagcacaaatttaacggcttcactggacagttttccttagaaggtagttttgtgtgactgtgactaaactattttattttaaaatgtcattcttatttatacattctaaagttggaaagactgatcttatatgtgtataatgtttattttgtacctagagtacatttaaaagggtggagactaagctaataaagtttttttggcc

SEQ ID NO: 249 - protein, 439 aa, Homo sapiens
GCAAAGTCTCCTGAGTGTGTAGATCTGGGCCTTGAGCCACTACTAGTTCAGTGCTTGGTGAGGGGTCTGCTCATTTTGGGAAAGTGTATCATGTGGCAGGGCCTCTCCGAGTGGCGGGAGACTGCCTACATGATTTTTTTTTTTCCCTGGGGATGTTAGCAGTTTCACAGCATAAAAGGGAGGACATGTTCTGGGGGGCTCCAGATTGGGAACCCTCAGGAAGTAACTTCCTCAGGAAGGATTCATAACCAATTGATCGATCAATTGATCATGTGAACTGCAGCAGCTGTCTGTCCCCTTACTTCAGAGTCCCCAGCTTCAGAGTTTTGTTGCGGACCTGTGAGGATTTCAGACACACACACACACACACACAGACCAGTTTTGTCTATACTACATCAGCAGTTCCAGACAAAAAGGGAGGCTATCTAGGGGCCCGAAA

SEQ ID NO: 250 - DNA, 2591 bp, Homo sapiens
gctgagcgcgggcgcggggccgctacgtgcgcggggagcgcggggagcgcggggagcgcggggctgcgctcgtgtgcgctcctgggcgctcgccgccgccgctgccgccgcgcgcctttgagtcagcaaactccgcggcccgcaagcccggctcggcccggccctgctctgttctgcccggaggagccgcccattgatcgtgtcctgtgctgaagatgtttccggaacaacagaaagaggaatttgtaagtgtctgggttcgagatcctaggattcagaaggaggacttctggcattcttacattgactatgagatatgtattcatactaatagcatgtgttttacaatgaaaacatcctgtgtacgaagaagatatagagaattcgtgtggctgaggcagagactccaaagtaatgcgttgctggtacaactgccagaacttccatctaaaaacctgtttttcaacatgaacaatcgccagcacgtggatcagcgtcgccagggtctggaagatttcctcagaaaagtcctacagaatgcacttttgctttcagatagcagccttcacctcttcttacagagccatctgaattcagaagacattgaggcgtgtgtttctgggcagactaagtactctgtggaagaagcaattcacaagtttgccttaatgaatagacgtttccctgaagaagatgaagaaggaaaaaaagaaaatgatatagattatgattcagaaagttcatcctctgggcttggacacagtagtgatgacagcagttcacatggatgtaaagtaaatacagctccgcaggaatcctgaaaaataattctaatgttactatcttaggaatagcaaattatgtccagtcatagagaagaaagcttcataataatacattcttacctaaagctcactgtcatgatgttaggtatttaaattcttaaagatgttgggttgtttattagtggtatttttatgttgtcttattttaggtaagcttctgtgtaaagctaaaaatcctgtgaatacaatactatcctttacaggcagacattattggtaaacaagatcttgccctccaatgaaatgacttacatgttttaaaaaaccgagttggttttattgaatttaaaaagataggtaactaagtagcatttaaaatcaagatagagcattccttcttgtatcagtggggcagtgttaccataaacacggtgtatatgttgttaaaccctatgaagagtaacagtgtagaccagactgcctctctcagatatgtgcctgatattttgtggatacctcccctgcactggcaaaacactatgcttttgggtgttagactgaaatattttaagagtatttaacctttccagtattctgtttcacgcttagatggaaatgtatcttatgaatagagacatattaaaataatgtttacatcttagaaaaaacatagatagtgctagtaatattacttataactgtaatatatagattcagaaatacattttcattatccaaaatcagcttcaacaaatggtttctggagacaaataatttgttttcattatcattgtataatcaggttaatgatttattttttgactaaatgtgcaatttcttatcactagataactttcagtatcagtggtggttacttattacttaaatcagaggaaggattttataaagattaataaatttaattttaccaataaatattcccataatttagaaaaggatgtcgacttgctaatttcagaaataattattcatttttaaaaagccccttttaaagcatctacttgaagattggtataattttcataaaatgtctttttttttagtgtcccaaagatatcttagataaactattttgaagttcagatttcagatgaggcaacattttcttgagataattacccaagtttcatccatgttgaatggtacaaaatatttctgtgaaactaacaggaagatattttcagataactaggataacttgttgctttgttacccagcctaattgaagagtggcagaggctactacaaaaagcaaccttttcattttcactaagagtttaaaagctattgtattattaaaaagtctttacaatgcttgtttcaaagaaccaacagaaaaaaaagctaagaaaactgagaactaacattaaaaaaattaaatttagaataagaatgatttctttaatttgtcctttttttctttggtctaaaacattattaaatttttgtaaatattttgatttaatgtgtcttagatcctcattattttaatacaggaaaagaaaagatttagtaatttcttaccatgctaatatgtaaagttcatgccatccaggcatttaagagcgatcctcatcccttcagcaatatgtatttgagttcacactatttctgttttacagcagttttgaaaaacacatactatgccaccaattgtcatattatttttagatgatgtaacatagccatcaaaattaatattatgtaatgcctaatacttagtatgtaaatgtcacgagatcatttttacattaaacgtgaaaaaaaatcaaaaaaaaaaaaaaa

SEQ ID NO: 251 - DNA, 1731 bp, Homo sapiens; identical to SEQ ID NO: 248

SEQ ID NO: 252 - protein, 538 aa, Homo sapiens
CTCTCTACAGACACAGACACTGCCACGTCAGAAGTTCCCCCAGATCTAGAGACCGGGGCTCCCTTTCCCACTAAGAACTGTTATGCTGTCATTGGGCTGTCGGGCATCTCTGATCTATCTAGACCGGAGGGCTCTGTCTGCTCCTGGGTCGGGGGTGACTCCAGATCACAGCCTCTTTCTAGGGCTTATGTGGCCAATTGCCAGCAATAGGGCAGACTGCAGCTAGCGCTCCTCACACTACATCTCTCTGGCTTCAAGTCTGGAAGCAGCCCTCCTCTGCCGGGCATTTCACCATTCTTACTGATGACCTGGTACACTGGGACACTAAAGCAGCTCCTAACTTCAGTCCCCCAGGGCCAGAACATAACATTTCAGGGACAACAGTTTTCGTTTCGCTCCGCTGAGTCTGTTACAAGGAAGGACAGAAGGTTAGGTGGCCGGTTTCACGTTACCATGGGTCATCAAGAGTCCCGGTGTTTCAAATTTTCCCAGGAGAGGTTCTGTGATTAGAGCGTAGAAATCTGTTCCCCTTTATTGA

SEQ ID NO: 253 - protein, 417 aa, Homo sapiens
GAGATAGTGATGCTGATGGTGACTTAATACTTCCTAAATGACAGTATCGGCACAGAAGTATATTCCAGTTTTATCAGCACAACAGTTTAACTGGGTCAGAGATTATTCCTAGTAAGAAATATTAGACTGATTGGAGTTAAAGTAGCACTCTACATTTACCATGGTGTTTGGCAGAATTGGTGTTCAAGGTCAGTTTATTGAATGAATGAATGAATGATTGAACAAATAGATGCAAACATTCAGAACTATATCATAATGGAATGTATGGCCAGAGACAGAATTACCCTTCTGTTTCTTTTACACACCAAAGTATCCTGATTCCCCTGGGAGTAGAGAGAAAGATATGAACCAATAGGGAGAGTCAGGCCATTCTACTGGTATTCATCCAACTGTCATTTGAAGGGAGGAGGCATGAAT

SEQ ID NO: 254 - protein, 382 aa, Homo sapiens
CTACATTCAACAAACGCCTCTTGAATGCTCTATGATTCCCCCAGACACATGCTGACAGACACGAGGGAAGCAAGACAGATTCTTTCTCCACTGTTAAACTCTGGGGAGTGGTATCAGCTTTTGAAACCCTGCTCTAGACTCTTACAAAATGGCTACACTTAGCACATACTCTGCCCTGGCTATATATTATATTGGGCCATAGAGATCAGCAATGTATCAATTAATAGATTAATCCAGAGACAGGAAGGAGGAAACGAAAGCTAGAGCCTCTTTGTGACTCCACCAACTCCTTCTTGTCTCCTTTTATTGAAGAGTCCGCACACATACTCACCCCTCTGGTGGGCCACAGAGGAGGCGCCTGCATCTTGCAGATGATGTAGCA

SEQ ID NO: 255 - protein, 385 aa, Homo sapiens
AGAGAACTCCAACTCGGACTCAGACTCTGACTAAAGGCCTGTCTGAGCTTAACAACTAGAGCCACTCGGCCCTCTCACCCACGCTGTCCTGACGGGGCTCCTGGAGCATGGCAGGAATGCCATGGGAGAACAGACCGAGGAGCCCGTCTCTCAAGATTACACTCCCGAGGCCTCACATTCAAAATTGGCTGTGCTGGCTTGGCACTGCTGAGCTAGCGTGGTAGGGCACGTTGACAAGCCTTCCTTCTCCCCTTTCTGTCCTTGAGCCCCTTTAACCTCACTGCCCCCACCGAAGCACACATCAAACGGAGCCAATCACTACAGCCAATCATGTGGCAGCATGGGGGTGGGGTGGGACTTTCTGTTACTAACAGGGACAGATAAA

SEQ ID NO: 256 - DNA, 2821 bp, Homo sapiens
aaaggttccccatctgaggcgtttgttgcagctacctgcacttctagattcatcttcttgtgagccctgggcttaggagtcaccatggcaactgaagagttcatcatccgcatccccccataccactatatccatgtgctggaccagaacagcaacgtgtcccgtgtggaggtcgggccaaagacctacatccggcaggacaatgagagggtactgtttgcccccatgcgcatggtgaccgtccccccacgtcactactgcacagtggccaaccctgtgtctcgggatgcccagggcttggtgctgtttgatgtcacagggcaagttcggcttcgccacgctgacctcgagatccggctggcccaggaccccttccccctgtacccaggggaggtgctggaaaaggacatcacacccctgcaggtggttctgcccaacactgccctccatctaaaggcgctgcttgattttgaggataaagatggagacaaggtggtggcaggagatgagtggcttttcgagggacctggcacgtacatcccccggaaggaagtggaggtcgtggagatcattcaggccaccatcatcaggcagaaccaggctctgcggctcagggcccgcaaggagtgctgggaccgggacggcaaggagagggtgacaggggaagaatggctggtcaccacagtaggggcgtacctcccagcggtgtttgaggaggttctggatttggtggacgccgtcatccttacggaaaagacagccctgcacctccgggctcggcggaacttccgggacttcaggggagtgtcccgccgcactggggaggagtggctggtaacagtgcaggacacagaggcccacgtgccagatgtccacgaggaggtgctgggggttgtgcccatcaccaccctgggcccccacaactactgcgtgattctcgaccctgtcggaccggatggcaagaatcagctggggcagaagcgcgtggtcaagggagagaagtcttttttcctccagccaggagagcagctggaacaaggcatccaggatgtgtatgtgctgtcggagcagcaggggctgctgctgagggccctgcagcccctggaggagggggaggatgaggagaaggtctcacaccaggctggggaccactggctcatccgcggacccctggagtatgtgccatctgccaaagtggaggtggtggaggagcgccaggccatccctctagacgagaacgagggcatctatgtgcaggatgtcaagaccggaaaggtgcgcgctgtgattggaagcacctacatgctgacccaggacgaagtcctgtgggagaaagagctgcctcccggggtggaggagctgctgaacaaggggcaggaccctctggcagacaggggtgagaaggacacagctaagagcctccagcccttggcgccccggaacaagacccgtgtggtcagctaccgcgtgccccacaacgctgcggtgcaggtgtacgactaccgagagaagcgagcccgcgtggtcttcgggcctgagctggtgtcgctgggtcctgaggagcagttcacagtgttgtccctctcagctgggcggcccaagcgtccccatgcccgccgtgcgctctgcctgctgctggggcctgacttcttcacagacgtcatcaccatcgaaacggcggatcatgccaggctgcaactgcagctggcctacaactggcactttgaggtgaatgaccggaaggacccccaagagacggccaagctcttttcagtgccagactttgtaggtgatgcctgcaaagccatcgcatcccgggtgcggggggccgtggcctctgtcactttcgatgacttccataagaactcagcccgcatcattcgcactgctgtctttggctttgagacctcggaagcgaagggccccgatggcatggccctgcccaggccccgggaccaggctgtcttcccccaaaacgggctggtggtcagcagtgtggacgtgcagtcagtggagcctgtggatcagaggacccgggacgccctgcaacgcagcgtccagctggccatcgagatcaccaccaactcccaggaagcggcggccaagcatgaggctcagagactggagcaggaagcccgcggccggcttgagcggcagaagatcctggaccagtcagaagccgagaaagctcgcaaggaacttttggagctggaggctctgagcatggccgtggagagcaccgggactgccaaggcggaggccgagtcccgtgcggaggcagcccggattgagggagaagggtccgtgctgcaggccaagctaaaagcacaggccttggccattgaaacggaggctgagctccagagggtccagaaggtccgagagctggaactggtctatgcccgggcccagctggagctggaggtgagcaaggctcagcagctggctgaggtggaggtgaagaagttcaagcagatgacagaggccataggccccagcaccatcagggaccttgctgtggctgggcctgagatgcaggtaaaactgctccagtccctgggcctgaaatcaaccctcatcaccgatggctccactcccatcaacctcttcaacacagcctttgggctgctggggatggggcccgagggtcagcccctgggcagaagggtggccagtgggcccagccctggggaggggatatccccccagtctgctcaggcccctcaagctcctggagacaaccacgtggtgcctgtactgcgctaactcctgattaatacaatggaagtttctgggcaaaaaaaaaaaaaaaaagtttcca

SEQ ID NO: 257 - protein, 465 aa, Homo sapiens
AAATTATTTCATGAGTTCAGCCGAGCCAGAGCCAACATGAAGACAGCCACAGTCTTGTTTCTGGTGGCTTTGATCACTGTGGGGATGAACACTACCTATGTAGTGTCTTGCCCCAAAGAATTTGAAAAACCTGGAGCTTGTCCCAAGCCTTCACCAGAAAGTGTTGGAATTTGTGTTGATCAATGCTCAGGAGATGGATCCTGCCCTGGCAACATGAAGTGCTGTAGCAATAGCTGTGGTCATGTCTGCAAAACTCCTGTCTTTTAAATGGTTGACAGCCATGTGGAAGATGGATTCAATCTTCATAAACATGAATGATGGCCAGCCCCAGAAGATTTCTTCTGAATTCACAGAGCCTGTGCTTGGCTACTTCCTAGCCCTAGAATTGCATTCTTGGACAAGGAAGATCTATATTGTGGTGACAATGCCCTAATATGTCTGTGTCTAAATAAACTACCTTAGCAT

SEQ ID NO: 258 - protein, 381 aa, Homo sapiens
CAAGGATCAGCCTGAGAGAACCAGAGTTAAGGCTCTTAGGGTTTCTGAGAGCTCGGCTGGAAGTGACTGGGTGACAAGGCACACAGGCTCAGCTGTGGCAGCTCCATCATGATTCCACAGGTAGTGACCAATGAGACCATCACAACGATTTCACCAAATGGAATCAACTTTCCCCAAAAAGACGAGTCCCAGCCTACCCAACAGAGGCAAGACAGCCTGAAGAAACATCTAAAGGCTGAGATCAAAGTGATAGTGGCAATCCAGATCATGTGTGCTGTGACAGTGTTGGCTCTGGGAATCATTTTGGCATCTGTTCCTCCTGTCCCATATTTTAACTCAGTGTTTTCTGTCCTGTTAAAATCTGGCTACCCATTTATAGGA

SEQ ID NO: 259 - protein, 313 aa, Homo sapiens
TCATGATGAAGAAAAGTAATATATTATTTTGGTACAAAAAAGTTTAAGGAGAAAACTGAGGTTTCTAATATAAACAGGGCTGTACAGAGACAAGAGGATTAAAAGCACTGGGGCATGGAGGTTCTGGTTGTAGAAAGCACTTGAGTATTCTTCAGGAGTGAGACTGGTGGTGCCCAACAAGAGCATCTGTCTCAGAGCTCCAATCTTGGTCAACCCTCTCTTGGGGCTGGTATGATGTGGCTTTAAACTTGCACTGCATGGCCTGGAGCAGCAAAGCCAGACACCACAATATCAGATTCACCCAAGAAGAGGT

SEQ ID NO: 260 - DNA, 1287 bp, Homo sapiens
cccacgcgtccggggccggcgcacgaaacctgtttggaggttatggatgataaacccaatcctgaagccctaagtgacagttcagagcgtcttttctcctttggcgtcatcgcagatgttcaatttgcagacttagaagatggctttaatttccaaggaaccaggcggcgatactacagacatagtcttcttcacttacagggtgccattgaagactggaataatgaaagcagcatgccctgttgtgtccttcagcttggagatatcatcgatggatataatgcacagtataatgcatccaaaaagtccctagaacttgttatggacatgttcaagaggcttaaagttccagttcatcatacatggggaaaccatgaattctataacttcagtagagagtatttaacacactctaaacttaacactaagtttctagaagatcagattgtacatcatcctgagaccatgccttcagaagattattatgcttatcattttgtaccattccctaaattccggttcattttacttgatgcatatgacttgagtgtcttgggcgtggatcagtcttctccaaaatacgagcagtgtatgaagatattgagggagcacaatccaaatacggaactgaatagtcctcaaggtgaattattcctttgagctgagaatctaatagattgtctttaaattcttcagctaccttttattcagcaggaagatggacaattaaggactttctgagccccagtttgtccagtttaatggaggattcagccaagaacagctaaactggttgaatgaagtgctaacattctctgacacaaaccaagaaaaggtggtgattgccatcttcccatttacccggacgcctctgacaatgtgtgcctggcctggaactacagagatgccctggcagtcatttggtctcatgagtgtgtggtgtgtttctttgctggtcacacccatgatggtggctactctgaggatccttttggtgtataccacgtcaacctagaaggagttattgaaacagctccagacagccaagcctttggcacagttcatgtctatcctgacaaaatgatgttgaaagggagaggcagagttccagatagaattatgaattacaagaaaggaagagccttccattgttagtctaatttattttaacttgatagaaaatgagctttgtgtttgtccctcctaaacaaaaaaataaaaatcctctgtctcatcaaaaaaaaaaaaaaaaaaaaaaaaaaaaaaaaaaaaaaaaaaaaaaaaaaa

SEQ ID NO: 261 - DNA, 2530 bp, Homo sapiens
ctaaagtggagcccagcggcgggtgtgagagtccgtaaggagcagcttccaggatcctgagatccggagcagccggggtcggagcggctcctcaagagttactgatctatgaaatggcagagaatggaaaaaattgtgaccagagacgtgtagcaatgaacaaggaacatcataatggaaatttcacagacccctcttcagtgaatgaaaagaagaggagggagcgggaagaaaggcagaatattgtcctgtggagacagccgctcattaccttgcagtatttttctctggaaatccttgtaatcttgaaggaatggacctcaaaattatggcatcgtcaaagcattgtggtgtcttttttactgctgcttgctgtgcttatagctacgtattatgttgaaggagtgcatcaacagtatgtgcaacgtatagagaaacagtttcttttgtatgcctactggataggcttaggaattttgtcttctgttgggcttggaacagggctgcacacctttctgctttatctgggtccacatatagcctcagttacattagctgcttatgaatgcaattcagttaattttcccgaaccaccctatcctgatcagattatttgtccagatgaagagggcactgaaggaaccatttctttgtggagtatcatctcaaaagttaggattgaagcctgcatgtggggtatcggtacagcaatcggagagctgcctccatatttcatggccagagcagctcgcctctcaggtgctgaaccagatgatgaagagtatcaggaatttgaagagatgctggaacatgcagagtctgcacaagactttgcctcccgggccaaactggcagttcaaaaactagtacagaaagttggattttttggaattttggcctgtgcttcaattccaaatcctttatttgatctggctggaataacgtgtggacactttctggtacctttttggaccttctttggtgcaaccctaattggaaaagcaataataaaaatgcatatccagaaaatttttgttataataacattcagcaagcacatagtggagcaaatggtggctttcattggtgctgtccccggcataggtccatctctgcagaagccatttcaggagtacctggaggctcaacggcagaagcttcaccacaaaagcgaaatgggcacaccacagggagaaaactggttgtcctggatgtttgaaaagttggtcgttgtcatggtgtgttacttcatcctatctatcattaactccatggcacaaagttatgccaaacgaatccagcagcggttgaactcagaggagaaaactaaataagtagagaaagttttaaactgcagaaattggagtggatgggttctgccttaaattgggaggactccaagccgggaaggaaaattcccttttccaacctgtatcaatttttacaacttttttcctgaaagcagtttagtccatactttgcactgacatactttttccttctgtgctaaggtaaggtatccaccctcgatgcaatccaccttgtgttttcttagggtggaatgtgatgttcagcagcaaacttgcaacagactggccttctgtttgttactttcaaaaggcccacatgatacaattagagaattcccaccgcacaaaaaaagttcctaagtatgttaaatatgtcaagctttttaggcttgtcacaaatgattgctttgttttcctaagtcatcaaaatgtatataaattatctagattggataacagtcttgcatgtttatcatgttacaatttaatattccatcctgcccaacccttcctctcccatcctcaaaaaagggccattttatgatgcattgcacaccctctggggaaattgatctttaaattttgagacagtataaggaaaatctggttggtgtcttacaagtgagctgacaccattttttattctgtgtatttagaatgaagtcttgaaaaaaactttataaagacatctttaatcattccaaaattgtgtccgttttcttgagcgttttgattttttacttttagcttataccagctgaatggcagccttgcctaatccacctacaacaagaatttcttaagctttcttttatttgcatgagagagccactaccaaggcatgttttgttatgctgaaactgggctgctgcatactgctaaatggcacctctgggattggcctacctggggatttcttggtttgtgaaaacaggagaggagaaatatctcatacaagtgaaaggatactggagagagaaattacccatttctaaaaaaaaaccacactctgtcgtatctgtgttaatgttttctagcatgtactctggtttcaacagacacaaatttatatgttaacccagttttcttgccgttctgtaagtgttttattcttagtgtgatttttttccattgggatgtttttgattgaacttgttcattttgttttgcttgggaggaaaataaacaattttacttttttccttaaaaaaaaaaaaaaa

SEQ ID NO: 262 - DNA, 391 bp, Homo sapiens
tcaagacccagcagtgggacagccagacagacggcacgatggcactgagctcccagatctgggccgcttgcctcctgctcctcctcctcctcgccagcctgaccagtggctctgttttcccacaacagacgggacaacttgcagagctgcaaccccaggacagagctggagccagggccagctggatgcccatgttccagaggcgaaggaggcgagacacccacttccccatctgcattttctgctgcggctgctgtcatcgatcaaagtgtgggatgtgctgcaagacgtagaacctacctgccctgcccccgtcccctcccttccttatttattcctgctgccccagaacataggtcttggaataaaatggctggttcttttgttttcc

SEQ ID NO: 263 - DNA, 1998 bp, Homo sapiens
cggcgcgatgcgcggagacccccgcgggggcggcggcggccgtgagccccgatgaggcccgagcgtccccggccgcgcggcagcgcccccggcccgatggagaccccgccgtgggacccagcccgcaacgactcgctgccgcccacgctgaccccggccgtgcccccctacgtgaagcttggcctcaccgtcgtctacaccgtgttctacgcgctgctcttcgtgttcatctacgtgcagctctggctggtgctgcgttaccgccacaagcggctcagctaccagagcgtcttcctctttctctgcctcttctgggcctccctgcggaccgtcctcttctccttctacttcaaagacttcgtggcggccaattcgctcagccccttcgtcttctggctgctctactgcttccctgtgtgcctgcagtttttcaccctcacgctgatgaacttgtacttcacgcaggtgattttcaaagccaagtcaaaatattctccagaattactcaaataccggttgcccctctacctggcctccctcttcatcagccttgttttcctgttggtgaatttaacctgtgctgtgctggtaaagacgggaaattgggagaggaaggttatcgtctctgtgcgagtggccattaatgacacgctcttcgtgctgtgtgccgtctctctctccatctgtctctacaaaatctctaagatgtccttagccaacatttacttggagtccaagggctcctccgtgtgtcaagtgactgccatcggtgtcaccgtgatactgctttacacctctcgggcctgctacaacctgttcatcctgtcattttctcagaacaagagcgtccattcctttgattatgactggtacaatgtatcagaccaggcagatttgaagaatcagctgggagatgctggatacgtattatttggagtggtgttatttgtttgggaactcttacctaccaccttagtcgtttatttcttccgagttagaaatcctacaaaggaccttaccaaccctggaatggtccccagccatggattcagtcccagatcttatttctttgacaaccctcgaagatatgacagtgatgatgaccttgcctggaacattgcccctcagggacttcagggaggttttgctccagattactatgattggggacaacaaactaacagcttcctggcacaagcaggaactttgcaagactcaactttggatcctgacaaaccaagccttgggtagcatcagttaacagttttatggacgattcctcagatgaaaagcttcagaaaagcatagtgacagctgaatttttagggcacttttccttaagaaatagaacttgatttttatttgttacaggtttccaatggccccataggaataagcaataatgtagactgataaacccttattttagtactaaagagggagccttgctatttcagtgggtataatttaaactttttaaagaaaatctgtacttttataaagatgtattttgtataacttaaataataatgctaaagtatactagggtttttttttcttgagaatgttactgcaatcatgttgtagtttgcacagacttttatgcataattcactttaaaaatatagaatatatggtctaatagttttttaaagcttttggactaaagtattccacaaatcttacctctttaggtcactgatggtcactccgattctgagtgccacattggtagactcctaaaatacagttgacaacttagccaattgcaactccagtgttgataattaaaatgaaatggtaaagcagcagactgtaaggtctttagagatttttttttaaggttcaggccgtaggttcctcaaggaatctcttaagttttgcccaaagactggtacttcctttcagtagggcgctaatgtatacacattaatgataagttgataacattaaaaatgtagctgacttatcctattaaacctcctctgctatgttcac

SEQ ID NO: 264 - protein, 493 aa, Homo sapiens
GCAAAAGGAAGTTTGTCTTAATAATGCAGCTTCTGTGATGTTAAGTATTTTTGCCTGTTTTACCTCAATTTGAACAAATAGGAGAAGTCTGTGTGCATGCTGGACATGCTCAGTACACACGACAGCCCGCCGGTGCAGTGCGGTGTCAGCTGCTCGGTGTTGGGTGCGTGACTCAGTCACAGTGGAATCCCTAAGCGTTCCTAAATCATGTTGTCAAATTCTCCAGTCTCGGGAGTTCTGGGCCCATTACCTGCTGTGCATAGGACTGGTACCAAGGACTATTGAGTGTAGACAAACGATCAACTCTTGGCTTTGACCATGGCTTTAAACAAAGGGGTGAAAACAAGAAAGAATAGGATGGAATCTGGAATAAAACAGTGAAAGAGCATTGTTCTTTGTACCTTGAATGTAGAATTTGTTTTTATTTCATAATTCTGCTAGCAAACATGACTGTTAAAATGATGTATTTATATATGTAATAATTTAGAAATTC

SEQ ID NO: 265 - DNA, 4359 bp, Homo sapiens
ggaggcgacggtggagacggctgccctagtgggagaggcggcggcggcggccgaggaggaggagggggaagcggcggcggcaaaggaaaatgcttggacagaagagatgagtactatttccactaaggcctagaattgcctactgtacaaatagtcctgatcaggcaatatacgaatggcccaaggaagccaccaaattgattttcaggttttacatgacctgcgacaaaaattccctgaagtacctgaagttgttgtatccaggtgcatgttacagaataataataacctggatgcctgctgtgctgttctctctcaggagagtacaagatatctttatggtgaaggagacttgaatttttcagatgattctggaatttctggtctacgcaatcacatgacttctctcaacttggacttgcaatcacagaacatttaccaccatggaagagaaggaagtaggatgaatggaagtaggactctaacgcacagcattagtgatggacaacttcaaggtggccagtccaatagtgaactatttcagcaggagccacagacagcaccagctcaagttcctcaaggctttaatgtttttggaatgtccagttcctctggtgcttcaaattcagcaccacatcttggatttcacttaggcagcaaaggaacatctagcctttctcaacaaactcccagatttaatcccattatggtaactttagccccaaatatccagactggtcgtaatactcctacatctttgcacatacatggtgtacctccacctgtacttaacagtccacagggaaattctatctatattaggccttacattacaactcctggtggtacaactcgacagacacaacagcattctggctgggtatctcagtttaatcccatgaaccctcagcaagtttatcagccttcacagcctggtccctggactacttgtcctgcatctaatcctctgtcacatacctcatctcaacagccaaatcagcaaggccaccagacctctcatgtctacatgccaatcagttcacctactacttcacaaccaccaaccattcattcatctggtagctcacagtcttctgcccatagccaatataacattcagaatatttcaacaggacctcgaaaaaaccagattgaaatcaaacttgaacccccacaaagaaataattcttcaaaactgcgttcttctggacctcgaacctccagcacttcctcttcagtcaatagccagaccttaaacagaaatcagcccactgtttacatagctgccagccccccaaatacggatgagctgatgtcccgtagtcaacctaaggtctatatttcagcgaatgctgccacaggagatgaacaggtcatgcggaatcagcccacactcttcatatccacaaactctggagcatctgctgcctccaggaacatgtctgggcaagtgagcatgggtcctgcctttattcatcaccatcctcccaaaagtcgagcaataggcaataactctgcaacctctcctcgagtggtagtcactcagcccaatacgaaatacactttcaaaattacagtctctcccaataagccccctgcagtttcaccaggggtggtgtcccctacctttgaacttacaaatcttcttaatcatcctgatcattatgtagaaaccgagaatattcagcacctcacggaccctacattagcacatgtggatagaataagtgaaacacggaaactgagtatgggatctgatgatgctgcctacacacaagatatttgaagaataagtaattcttggctgggcatggtggctcacgcctgtaattccagtgctttgggaggccaagatgggaggatcatttgagcccaggagtttgagaccagctggggcaacatatggagactccgtctctacagaaggttttgaaattatgcaggcatggtggcacacacctgtagtcccagttactcagtagactgagctcttttggtacaccagaaggccagaatggaacgacttcaaagagaacttgagattcaaaagaaaaagctggataaattaaaatctgaggttaatgaaatggaaaataatctaactcgaaggcgcctgaaaagatcaaattctatatcccagataccttcccttgaagaaatgcagcagctgagaagttgtaatagacaactccagattgacattgactgcttaaccaaagaaattgatctttttcaagcccgaggaccacattttaaccccagcgctattcataacttttatgacaatattggatttgtaggtcctgtgccaccaaaacccaaagatcaaaggtccatcatcaaaacaccaaagactcaagacacagaagatgatgagggagctcagtggaattgtaccgcctgtacttttttgaaccatccagccttaattcgctgtgaacagtgtgagatgccaaggcatttctgagccaaatggccctgtatcttctctaaaaccacatctaaagttcaagaaactagtctgtcatcgggaaaaagtttcactgctacataggattttgtcaaattgaaggtgtgacaagatggtgttctgctaatgttaaatgtcagcccacagagctaataatacctcagtataatgtcatgagcagttgaaattcatcacatgaaaagtaatctgctgaaagacttggttgcccactgcctaactgtgtacagtgttaccagtgtcccattatggataattctcaatatgttaacacctaggtgttcccaatacctttttcccctcatgtcactactgaattttgacaggaggaaggaatagaatgatagcttgttttatttgtaaagctttcagtgaaacactacatacacgaagaaaaggaacaaggtttaactatttaagaaccatttgctgccgcatagtgccattggatagggaagaacttcagaaatctgtggtactcttggccttgtctttgtcttccctgaacgtgtctccactctgtgaagccagcatctaggggctaaagatgcaaaggaaagcagcatgcattgtctgtacaaatgtgcagcgaaataccccaaagcttttcctactgtacagatctctcgagtctgctttaagtgatttcttttcttcttgattattttcttatatttctatatgtatagtgtaatagccttttgttaactaattttcttttttccttttagtaattaagcacgatcatgtccctttttaagccttacctgagaggaacaatgccttaaaataaaaaagcattaatgagatgaaagtatgcacagaataactttcctctacttattctgtactttgccctcatgagttccaatgttgtgtgaagacaggcagatgctgcacagtgaattgcagatgatattacagaagtgatgtctgtaggtcacattaaatactgacttgagcagtgggtgacacaacacagtgtttgtcttccacagggaagcttaaaacaaaagatatttttaacccactgacagaacaacaaggttaagcttcatctgcttggtgtcccacagaacttgcacaagcagttgttattgggaaagtacagtctcaaaaccagcaacagcagcagtacctacagccctttttttggagagaagtttaaatgctttactgttggggcagtccatttctaatcctgacttggtgacagtatcatgtgtatttataaaacaaggctagccatatttaggacaactgaagaaaagctggaaaaaaaaacaagcaaacttgaacactgaagcaacctcaagcatctctttattttgatgatatatttttgtaaggaaaatattcagatgatcaggaatgtatataactgaaatcaagaaaaagaacagtatgcatttaaaaagacagaattatgaaattatatgagtgcttagaatggggctaagggaagtgctgaaatagagcaaaggatggaagataatatagactaccacccactgtaaatgtttgcaagtggctgtgttttaaatgggattattacagttgatctctatgaatgtcagagccctaactttcaggctttgcattttgtatatgggaagaaatatgacaatcctaggtaattaaaccatagacccaaagcccttacgtttgatgcaatttatttttaaaataggccttgtttttcagcttcatctgcagttctatgtgaagattgataaatcagtttttacttgttttattaataaaacgtaatttggatatcttgagttgatggttttgtgatttagctgggtaaactatctttgtaacagataagttatttataaaaattaaaaaacttatattctaatgtg

SEQ ID NO: 266 - protein, 361 aa, Homo sapiens
ATGGGGGGGAAACGATGTCCCTCTAGTCCTGGTGGTGTCTGTGTGACCTGTTAGCAAACATTGTCCAGTGCTGAAACGGAGTACCTCAGAAGGGTGCACTGTTCTCTGCTGAAGTCACGGTAGAGTCAGGACATGATGGTTCGGAATGTCTCGTTGGCAGATGTGAGCCCAATAGCTCTTTGGTGTAGTGTTTTCTCTTTAGGCTTACAGAGAGTTTTCATTTTCATATTCAGTTTTTTTTAATGTCCCATTTCTTTTGCAATATTATTCACAAGAAGGTAATGACTCCAACTGAACGCGGAACTCTTGCCGGCGCTCCGGGTGCATCTGTGTTTATCCAAGCAGACACGTCATGGATGCT

SEQ ID NO: 267 - DNA, 2330 bp, Homo sapiens
gaattcggcacgagcgacgcggcccagaggccaggaacattccgcgcgtggaccagccgggccagggcgatgctgcgggtgcggtgtctgcgcggcgggagccgcggcgccgaggcggtgcactacatcggatctcggcttggacgaaccttgacaggatgggtgcagcgaactttccagagcacccaggcagctacggcttcctcccggaactcctgtgcagctgacgacaaagccactgagcctctgcccaaggactgccctgtctcttcttacaacgaatgggaccccttagaggaagtgatagtgggcagagcagaaaacgcctgtgttccaccgttcaccatcgaggtgaaggccaacacatatgaaaagtactggccattttaccagaagcaaggagggcattattttcccaaagatcatttgaaaaaggctgttgctgaaattgaagaaatgtgcaatattttaaaaacggaaggagtgacagtaaggaggcctgaccccattgactggtcattgaagtataaaactcctgattttgagtctacgggtttatacagtgcaatgcctcgagacatcctgatagttgtgggcaatgagattatcgaggctcccatggcatggcgttcacgcttctttgagtaccgagcgtacaggtcaattatcaaagactacttccaccgtggcgccaagtggacaacagctcctaagcccacaatggctgatgagctttataaccaggattatcccatccactctgtagaagacagacacaaattggctgctcagggaaaatttgtgacaactgagtttgagccatgctttgatgctgctgacttcattcgagctggaagagatatttttgcacagagaagccaggttacaaactacctaggcattgaatggatgcgtaggcatcttgctccagactacagagtgcatatcatctcctttaaagatcccaatcccatgcatattgatgctaccttcaacatcattggacctggtattgtgctttccaaccctgaccgaccatgtcaccagattgatcttttcaagaaagcaggatggactatcattactcctccaacaccaatcatcccagacgatcatccactctggatgtcatccaaatggctttccatgaatgtcttaatgctagatgaaaaacgtgttatggtggatgccaatgaagttccaattcaaaagatgtttgaaaagctgggtatcactaccattaaagttaacattcgtaatgccaattccctgggaggaggcttccattgctggacctgcgatgtccggcgccgaggcaccctacagtcctacttggactgaacaggcctgatggagcttgtggctggcctcagatacacctaagaagcttaggggcaaggttcattctcctgctttaaaaagtgcatgaactgtagtgctttaaacaatcatctccttaacaggggtcgtaagcctggtttgcttctattacttttctttgacataaagaaaataacttctgctaggtattactctctactcctaaagttatttactatttggcttcaagtataaaattttggtgaatgtgtaccaagaaaaaattagtcacctgagtaacttggccactaataattaaccatctacctctgtttttaattttctttccaaaaggcagcttgaaatgttggtcctaatcttaattttttttcctcttctatagacttgagaatgtttttctctaaatgagagaaagacttagaatgtacacagatccaaaatagaatcagattatctctttttttctaaaggagagaaagacttagaacatacacagatcctaagtagaaccaggtaattgtctctttttctaataaggaatttgggtaatttttaattttttgttttttaaaaaataacctagactatgcaaaacatcaaagtgaattttccatgaatgtttttaatattctcatctcaacattgtgatatatgctactaaaaaccttttcatatacatcttacctcatttcaagtgaattattttaatctttttctctctttccaaaaatttacaggaatgtttagtgtaattggatttcgctatcagttcccatccttaagttttgatattcaatatctgatagatacactgcatctttggtcatctaagatttgtttacaaatgtgcaaattatttagagcatagactttataagcattaaaaaaaactaatggaggtaaaacctaaatgcgatgtgaaataattttagtgttgatactgtatgtgtatttttattctaataaacttttgtgttccagattgaaaa

SEQ ID NO: 268 - DNA, 3255 bp, Homo sapiens
aagcttactcagcgcatctgctacagcattttatcttcccaagagccccatgaggcgatgacccaggatgcagccaggggccacgacatgcacggaggaccgcatccagcatgccctggaacgctgcctgcatggactcagcctcagccgccgctccacctcctggtcagctgggctgtgtctgaactgctggagcctgcaggagctggtcagcagggacccgggccacttccttatcctccttgagcagatcctgcagaagacccgagaggtccaggagaagggcacctacgacctgctcaccccgctggccctgctcttctattccactgttctttgtacaccacacttcccaccagactcggatctccttctgaaggcagccagcacctaccaccggttcctgacctggcctgttccttactgcagcatctgccaggagctgctcaccttcattgatgctgaactcaaggccccagggatctcctaccagagactggtgagggctgagcagggcctgcccatcaggagtcaccgcagctccaccgtcaccgtgctgctgctgaacccagtggaagtgcaggccgagttccttgctgtagccaataagctgagtacgcccggacactcgcctcacagtgcctacaccaccctgctcctgcacgccttccaggccacctttggggcccactgtgacgtcccgggcctgcactgcaggctacaggccaagaccctggcagagcttgaggacatcttcacggagaccgcagaggcacaggagctggcatctggcatcggggatgctgcagaggcccggcggtggctcaggaccaagctgcaggcggtgggagaaaaagctggcttccctggggtgttagacactgcaaaaccagggaagctccacaccatccccatccctgtcgccaggtgctacacctacagctggagccaggacagctttgacatcctgcaggaaatcctgctcaaggaacaggagctactccagccagggatcctgggagatgatgaagaggaggaagaggaggaggaggaggtggaggaggacttggaaactgacgggcactgtgccgagagagattccctgctctccaccagctctttggcgtcccatgactccaccttgtcccttgcatcctcccaggcctcggggccggccctctcgcgccatctgctgacttcctttgtctcaggcctctctgatggcatggacagcggctacgtggaggacagcgaggagagctcctccgagtggccttggaggcgtggcagccaggaacgccgaggccaccgcaggcctgggcagaagttcatcaggatctataaactcttcaagagcaccagccagctggtactgcggagggactctcggagcctggagggcagctcggacacggccctgcccctgaggcgggcagggagcctctgcagccccctggacgaaccagtatcacccccttcccgggcccagcgctcccgctccctgccccagcccaaactcggtacccagctgcccagctggcttctggcccctgcttcacgcccccagcgccgccgccccttcctgagtggagatgaggatcccaaggcttccacgctacgtgttgtggtctttggctccgatcggatttcagggaaggtggctcgggcgtacagcaaccttcggcggctggagaacaatcgcccactcctcacacggttcttcaaacttcagttcttctacgtgcctgtgaagcgaagtcatgggaccagccctggtgcctgtccaccccctcggagccagacgccctcacccccgacagactcccctaggcacgccagccctggagagctgggcaccaccccatgggaggagagcaccaatgacatctcccactacctcggcatgctggacccctggtatgagcgcaatgtactgggcctcatgcacctgccccctgaagtcctgtgccagcagtccctgaaggctgaagcccaggccctggagggctccccaacccagctgcccatcctggctgacatgctactctactactgccgctttgccgccagaccggtgctgctgcaactctatcagaccgagctgaccttcatcactggggagaagacgacagagatcttcatccactccttggagctgggtcactccgctgccacacgtgccatcaaggcgtcaggtcctggcagcaagcggctgggcatcgatggcgaccgggaggctgttcctctaacactacagattatttacagcaagggggccatcagtggacgaagtcgctggagcaacctggagaaggtctgtacctccgtgaacctcaacaaggcctgccggaagcaggaggagctggattccagcatggaggccctgacgctaaacctgacagaagtggtgaaaaggcagaactccaaatccaagaagggctttaaccagattagcacatcgcagatcaaagtggacaaggtgcagatcatcggctccaacagctgcccctttgctgtgtgcctggaccaggatgagagaaagatcctgcagagtgtagtcagatgtgaggtctcaccgtgctacaagccagagaagagcgacctctcctcaccaccccagacgcctcctgacctgccggcccaggccgcacctgatctctgctcccttctctgcctgcccatcatgactttcagtggagctctgccctagtgtgggcccagcgccagactggacagaagccctggggcaacctcctcggccacccctccaggacagtccctctctgtggagaactgaatggccctgtgcagagccatagtcccactgtgggtcctgcaatgagcaggggctgggagtagagggtttctggggcctcagggttctgggaaagcaacagctatcagagagagaagggccagaccccatagcctcttagattcctggcagtagaaggagaaggatgggtaaattgacctctgaagtccctgaccattagcatggtctaggatcctttctagaaggaagatctgaggctctggtgctcagggggatggcttgggccttttctctcaaccttggctgagcctaccccttactttgccaaagacttgaggaccctgtatgtctggagttcagtcccctcctctgtggggctcaggtgattgaaatgtggatgaaacatttctctacttcaagaccacctctccctgcaaacaccacacacacatggcatgcatgtacgcacatgcgcaccg

SEQ ID NO: 269 - protein, 497 aa, Homo sapiens
AGATAGAGCAGGGTATCAGATGTTTTCCTTTGACCTCTGCACACCACACATAGGCAGCCCACACACATGTGTGCCTATGACACACACAAATAAAATAAACAATAATAATTTTAAAAAATCACTCCAGAATTTCTGCTTTGAACTCTCTGATAACCAAGCCGTGGTTGCACGGGTCCATCCTTGTGTGGATCTTAGTGGTTCAATCCAAACACACAGAACAAATAAGGTTGTCTGACACTAGGGAGACCTCCCGAAGCTCTTGCCTTCCTAATGTGCACCTTTGAGTGTGCCTCATGGAATCGAGTCAGTTCTTTCTCATATCCTCTTTAGCAAGACCCTTCCTGGACACTGCTCTTTGTTTTTATTTTCTCCATGGTACAGTGTAGATAATTATGCATCTCCTTCTTTTATATATTCTCATATATACTAAAATGTAAGCTCACAACAGCCCTGTGTTTTCATTTTTCACTAACATAGTCCAGAGACCAGAACAATGC

SEQ ID NO: 270 - DNA, 1457 bp, Homo sapiens
agccgccggctcgggagacctgccgcccctcgggcccgccacgctgctggcgctgtgcgtgcagcattccgcccgtgagctggagctgggccacctgccacgactgctgggccgcctggcccggctcatcaaggaggccgtctgggaaaagattaaggaaattggagaccgtcagccagaaaaccaccctgagggggtccccgaggtgcccctgactcctgaagctgtgtctgtggagctgcggccactcatgctgtggatggccaacaccacggagctgcttagctttgtgcaggagaaggtgctggaaatggagaaggaggctgaccaagaggacccacagctctgcaatgacttggaattatgtgatgaggccatggccctcctggatgaggtcatcatgtgtaccttccagcagtctgtctactacctcaccaagactctctattcaacgctgcctgctctcctggatagtaaccctttcacagctggtgcagagctgccggggcctggcgcggagctgggggccatgcctccaggattgagacctaccctgggcgtgttccaggcagccttggagctgaccagccagtgcgagctgcaccctgacctcgtgtctcagacttttggctacttgttcttcttctccaacgcatcccttctcaactcgctgatggaacgaggtcaaggccggcctttctatcaatggtcccgagctgttcaaatccgaaccaacctggacctcgtcttggactggctacagggagctgggctgggcgacattgccactgagttcttccggaaactctccatggctgtgaacctgctctgtgtgccccgcacttccctgctcaaggcttcatggagcagcctaagaaccgaccaccccaccttgacccccgcccagctgcaccatctgctcagccactatcagctgggccctggccgcgggccgccagccgcgtgggaccctccccctgcagagcgggaggctgtggacacaggggacatcttcgaaagcttctcctcgcacccgcccctcatcctccccctggggagctcgcgcctgcgcctcactggtccagtgacggacgatgccttgcaccgtgaactccgtaggctccgccgcctcctctgggatcttgagcagcaggagctgccagccaattatcgccatgggcctcccgtggccacgtctccttgagaaccaataccaaacgagcgcgcgaaccttgaaatgtcacgggcttctacggacaggagcccgcctgagcgcaaagctttctgggagttgtagttcttatcccgcgtggaatgttgggagattgagttttcgggaagtagcggatgggacggtgggagcatgggcttaggatgtgaatgccagggagcaataaaggtatccgtggtatcggcaaaaaaaaaaaaaaaaaaaaaaaaaaaaaaaaaaaaaaaaa

SEQ ID NO: 271 - protein, 545 aa, Homo sapiens
AGAACAATCAACTTTTAGAGAAGTTACCTTAGCATAAGAGCAGATAGATCTGTGGATTTCACAAAGTTACCCCTGGCTCTGGTTAAACTGTGTGAGCTGTAAAGTAAGTGTAGTCACAGTGAAGAGTTTGCTTTTGTCTCGTTTTCTAGATGAATATTGGAGATGCCTAGACTATAACAACTTTTCTTTTCAAGCTTCCGTTTGTGCAGTTTTTATTGTCATCTTGATTTGTTAGATTTTTTTTTTTTAAAGAAACATCCTGTAATAGAAAAAAAGTATTTTGTTCTGTTCTAAAGGTCATTTCTCTGGTAAAAGTTACTGTGATTCTTAGATTGCAAAGAATAATGCTAGTTAAATGCCAATGAACTATTTTTACTCTTTTTCTATGAAATGTATAGATCTCTGGGGCAGACGGTGGCAATGGTATCCCTTTTTACCTTATAAACACTTGAACACTTGCATCAGAAATAATGCTGACCTGATAATGCTCCCACTATATTTTCTCAAAGTCTGTTTACTTAAAATTGTATGAGATGACATGACTA

SEQ ID NO: 272 - protein, 227 aa, Homo sapiens
TCGGCACGCAGGGGGAGACAGCTGGAGGTGGAGAGACTGAGGTCCTTGGTAGCCTGAGTGTGCCCCTGCTCCTCTTCAGGAAGTGAAGACAAGCCTTGGTGTGCAATCACAAGTCCTTCTGGAGTTCTCATCCAGACATTCTGAAGATGGAGAGGTCTACTCAGGAGCTGTTTATCAACTTCACAGTTGTCCTCATCACCGTTCTCCTTATGTGGCTCCTCGTGAAG

SEQ ID NO: 273 - protein, 437 aa, Homo sapiens
AGCAGCCAGTGTCTACAGTTAAAGATTGCCAAGTGTATTTCAATATGGTTGTAAAGATCACATTCAGATATGGTTTGCACAGGAGGCAGACAGCTCTAATGTGGATAGATGATAACTTTTACTGCTCTGCAGTAAGTTTTATAGGCTACATTTTCCTAATTTCATATTTAATTGTATTTTTACTACAAAAAACATTGGAGTACAAATCATATGAAATGAAAAAGGTGCCTTCATGGAAAAATATTTTTTTTGTATGTGTGTGATATAAAAATAATGTTGAGTAAATTTCTGAGTAAGAGTTGTATACCCTTTGTCTAAATATGCTTGTCTGTTCACGGAAAGGACAGAACTGGAAATTTTAAGAAAGGAAAAAAAGTACACTGAAGTACTTTGGATAACTTGAGTTAATGAAAAGTTCTAACTGGTTTGGTGCTGCC

SEQ ID NO: 274 - protein, 460 aa, Homo sapiens
CTGCAACTTCTGCACACACCCAAAATGACATAACAGAAGTCAAGAGTGCTAACATTGGTGGCCTGGATCTGCAAACCACAGTTGGGTTGGCAACGGCTGCTGCTGTGTTCCTGGTTGGGGTTTTGGGATTGATAGTGTTCCTCTGGTGGAAGAGAAGAAGGCAAGGCCAGAAGACTAAAGCTGAAATCCCAGCCAGGGAGCCATTGGAAACCAGTGAGAAACATGAGAGTGTTGGCCATGAAGGACAATGTATGGATCCCAAAGAAAACCCCAAGGATAATAACATCGTGTATGCTTCCATCTCCCTCTCAAGCCCGACCTCACCAGGAACAGCGCCCAACCTGCCTGTCCATGGGAACCCCCCAAGAAGAGACTGTGTACTCCATCGTAAAGGCCAAATAAGTTGGTCTGGATGACACTCTTAGAGTCACCTTTGTTTCTAGTAGGAAGACTCTCAGCT

SEQ ID NO: 275 - DNA, 5983 bp, Homo sapiens
gtgtgggactgccgctctgcgcggcgagaggtggcctgggaatggccgggccgggggtgggccggagccgctgtggcggcggcggcggctgggggcggtgagcgcggcgtggggctgcccctccccggaggcggcgggggcggccggggccgcgccgcaccgcaccgcgcgggcggccatggagcgagcctagggcccgacaggaactgtggaaggtgcatcagtgaagaaatggaccaatgtgtataatcatggaatctccttgctaaccatcaccaccagctctccttaatacatgagcaagagtgggtcaggggagaaggaaaagaggtcaacatgaagctaaagcagcgagtcgtgctgttagcaattctccttgtcatttttatcttcaccaaagttttcctgattgacaacttagatacatcagctgccaaccgggaggaccagagggcctttcaccgaatgatgactggcttgcgggtggagctggcacccaagctggaccataccttgcagtctccctgggagattgcagcccagtgggtggttccccgggaagtgtaccctgaagagacaccagagctgggggcagtcatgcatgccatggccaccaagaaaatcattaaagctgatgtgggttataaagggacacagctgaaagccttactgatacttgaaggaggccagaaagttgttttcaaacctaagcggtatagccgagaccatgtggtggaaggggaaccgtatgctggttatgatagacacaatgcagaggtagcagcctttcacttggacaggattctgggtttccaccgagcccccttggtagttggcagatttgttaatcttcggacagagatcaaacctgtcgccacagagcagctgttgagcaccttcctaactgtaggaaacaatacttgtttttatgggaagtgctattactgccgagaaacagaaccagcttgtgctgatggagacataatggagggatctgtcacactttggcttccagatgtgtggcctctgcagaagcaccgtcacccatggggcaggacttaccgagaaggcaaattggccaggtgggagtatgatgagagctactgtgatgctgtgaagaaaacgtccccttatgactctggcccgcgcctcttggacatcattgacacagctgtctttgattacctgattggcaatgctgaccgccatcactatgagagctttcaagatgatgaaggcgctagtatgctcatccttcttgataatgccaaaagctttgggaacccctcgctggatgaaagaagcattcttgcccctctctatcagtgttgcatcattcgggtgtccacctggaacagactgaactacctaaagaatggtgtgctaaagtctgccttaaaatctgccatggcccatgaccccatctccccagtgctctctgatcctcatctggacgccgtggaccagcggctcctgagtgtcctggccaccgtgaagcagtgcaccgaccagtttgggatggacacagtactggtggaagacaggatgcctctctcacacttgtaattctcgacacaaaataagtgaaacttctttttacaaagatagagaaacagcacaatcaattccaaatggtatgagatggattggaagtggccagcagcaagttctggtgacaggacagggtggccttggatgtctttggtattttctgtagtagaaactaaagcaaagaccacaagtttcagagcatggagacattcctgctgaatcgccttctcacctcctcggcaattgctcattctagggttgggcatcatagttggtcagtcttaattcccatgccaaaggacaaacaggtgtgacatttggatagatgaatactgggattggctctggagcatgtgttttgagttgaaccttgcagtcctttctctacgcccgtggattttgtggaaacactttgcaatctctttgtctttttttttttaccagaactagttacattggaatgcttactgtcctacagagtggcagcaaataaaaccttgcattccatcaagccaaaatagcacactctgttagaggagatacatgtttaagatagaattggagggaaggacaaaaacagaaaaatgtttgggcttttaagccattgggtagtattgttttgatgatcttagaggagggaagaagagagagagacccaatggtagaaccagaatcagggagatgactgaactactgaaaaacaggttcccttgtatttaggatcttaaggtgtataaaaagcaaacatgactttgcacctaagtaaattctgcattctcatagttgtgtcccaattaaccaaaaagttgtctctagagaaaataatattacaatctaagcatgattctctgtggagactaattttttccccttttgccaaaagcagtccttcccaaattaacaaagcaaactgaaataataccttgaataacaggttgcctgtggtctctgtcatcctcgtctctcttctgaaatgaatttccacctctgcctttaaggcatttttgtcactgaagctgctgttcccaagagataggcaacctttttgtccctttctcataagaaagggacactcctacaggtgagagtgtataccttactctctcagataagtggctggacttatcttgtgatttggggccatggaagattggaaacaaagattttaagccttcttcttttttgcttttttcttttttttttgagaccaagtctcactctgttgcccaggctggagtgcagtggcacgatcttggctcactgcaacctccgtctcccaggttcaagcgattctcttgcctcagcctccagagtagctgggattacaggcgcccgccatcgtgcccagctaatttttatatttttagtggagacagggtttcgggtttcaccatgttggccaggttgatcttggactcctgaccccaggtgatccacctgcctcagccttccaaagtgctgggattacaggcatgagccaccgtggccggccaagattttaagccttctgagccttgaaattgaggaggttaaaaggaagagccttaagattttgatttatgtcaaatcctaattctatcattcagtcttgtttggagttctgaacccatgatgttgtattatgcttctttctcctcttagcactctcaaatttcaggtttgtaaaacacagtttttgttttgtgttctggcaaagtgatctcaacatgtaagtagttgcagtaaaacacaggggcaaaggaagacaggcctgatgtgcccactcatctatggactcagagctgtgtgctttgctcctgcatcttgttgaggtgctgttccagctttgcatttctgtcaagtagaggcgaatatataaacagtgtggttgaatacatttaatgccagccattggaaactagttttaggcaaccactctcaaaaacagctttagaatttatgcccagttttcttgcattgaaagataactgagtaataacctgtaactatttttaaatggcatgaaattaggaaacttttgtacattttatatacattttgagatgaacagaacaatgggctgagttataaaaagcgtgtattgaatttaagaagacagactagcacaaaacacagaattcgtgttaaccaaaggaggcattgatttcagttttaaggctactcagtgttgtgtgtccagggaaattcacagctcagtatgagaataccttggttagtgctcacccacaagcttccaggagccagctgggaggagacaataggaagagatgtcagctctgctctccctgtaaatgttagttgaactaagttatggatttgtggtctttcaaatacatgacgcctttagtatgccacactgaaatgaataagaagtcttctgaaactgggaacttcataacattgaaggcagaagattctgctaaggaaaaaagcaggcaggaaagaaaatgtctcatcctttcttgaaagcatttgcagaaaatatatcatttcattttattcccatctgttttcaaactcgtgatcttaaaaggcattctgatgataaatttagaattttcatctataaaatttagaactctaatccataaagttagaattgagctaatagagtggtatgacatggcactaaaaatataaatttttgttgtaagtcaggattggagtaagctggaaaagtatgtttaggcaaatcttggagaaaaccaaccataaacttacagctctaaaattcagaaagccctaaaatttcaaacactgtttgaaagaagaggtgggggccgggtgccgtggctcatgcctgtcatcccagcatttgggaggctgaggcaggcagatcacctgaggccaggagttcgagaccagcctggctggctagcatggtgagaccgtctctactaaaaatgcaaaaattaacagggcacggtggcatgcgcctgtagtcccagctactcgggaggctgaggcaggagaatcacttgaatccaggaggcgaaggttgcagtgagctgagattgtgctgctgcactccagcctgggagacagagcgagactctgtcttaaaaaaaaaaaaaggaggtgaatttttttttaagttttgtaacactgtcctactttatttattagaatctaaggctgttacaatcaagtcgttgcagggtttggatcagctgtaagttaggtatgcctaccaaacatccaaaggtagacgtggagacattttaatactacaaaactaggaaaatcagaactcatggccatttcctgccctcctccaacttgttaaaacatgtttattctaaagttcgaatggataaatttgagtataaaggttttgttataaaactgttctttagtgtaaggctgcattgtgggtttgggggaaatgtaaataattttctgtgtaaaacaaattcataggatctgatttgctcagagtattattcaagaatgtattaataaggcattgccccctgtttgcactcagggttaatatgtcaaatgaaatttaagaaggaaatggaagaattcaggtacattaattgcatattattttgggaaagatgagtcctatacgtggcaatttttcaatgtcatctgaagccagcattatcttccaaagaaatcgatcttttttttctaaaaaaaaaaaatgcttttgccttcccttcccttcccatccgccatatttcttcagcctttcttctcgatcacccgtgtattctttgaccagtaaatgaccacacctcaatgatggtaaaacagcatcatcagtaagctatcttatatgcctcatcctgtgagtttgagcttcaggaaacatgagtaaaagtatatgtaatgtatatagtcgtatatgtattctagcaagaaaaacatatttattttgacaaaggggaacactgactttctgaaggattcagaaagaaccttagtgaaaggttctcagtctctgagagtggaccctaattaacataaagaccattcatcagcgaataactactgagcaactctagtgtgccagcacaggccagacatactagtgagccaggcacatctggccttgggaaactcatcctacaggggaaggccagtttttttcccttcaattcctcaagtctgggtggtgacaaggtaggggctaggtactggactaccacaggtttttaggaactaaggtgtttctcataaacacaaaatgttgggtgaaactgggaacaactactcagaagctcatttatttgcttaaatggaaagtgtgggagccactaccctctcttttgatctgccaaggatttcctctcagagctgttgcacagacagagattgtacttggtaagataccaaacaagacagatatggatctaaatttctaatgtgttctatgggtttcaattctgaaaaaagaaaatgaataaagattttaataaat

SEQ ID NO: 276 - protein, 445 aa, Homo sapiens
GTCTTTTTCTTCCCAGACACTATTCTGACTTACGTCTCCATTACAAACATTTTATTGAACTACATAAAAATGTGTGAACCACAAAAAAAAAATGTATTTGTCAAAATTGTAGTTGTCTTTCTGAGGCTGACCTGAGTTCTCTGATACCATTCTCTCCAGTTGTATCCAGTTTCCTGTAAACAATGTGACTTTGTTTTTCTCAGTAGCTAAAACATCCCAATTATGTGAGTGTACACTTTCTTTACTCATTCCTCTGTGGGCCACCAGCTGGGTTGGTTCCATATCTGAGCTATTGTGCATGGAATTGTCTCTGTGGTGGGTGTAGTAAACTCCCAGGAATGCCTGTACATGTTTGTAGAGGCCAGAAGAAGGCACAAAATCTTGAGCCAGGCTTACATGCACTTGTGAGTAGCCCCACATAGGTGCTAAGAACCCAGTTCAGGTC

SEQ ID NO: 277 - DNA, 3032 bp, Homo sapiens
agtcgctgtttgggacgctgggtgtgcggtgttctgtctccgctcccgtttcgctgtcacagcccgttccttcccggagcccgggacaggctgggcgcgcgcccgtgtgagtgagcgggactcagggcagaagtgtcccctcactgcgtttttttttccttttatccaaagaacggggcagttagtacgcttgccttcctgtcgcccggttgggagcggggttggtgtgcggagtggttcgcctttttttctttagaacttgtgagcctttttttttttttttttttctttcctttttttaggctcagtgctgtccgggctggtttgcccggtccctgactaacggctttctgccccttctctcgccacccctgcccaaggtcgcccctctgccttcgcccctgtcccgggagggtgggaagctttgaccccgccctgcccactcgcgtctccgcagccgtagccgcgcctgtcccaatatgaatagggtcaacgacccacttatttttataagagatattaagcccggactgaaaaacttaaatgtcgtctttattgtcctggagataggacgcgtgaccaaaaccaaagacggccatgaagtgagatcgtgcaaagtagcagataaaacgggcagcatcactatttccgtgtgggatgagatcggaggtcttatacagccaggggatattattcggttgaccagagggtatgcatccatgtggaaaggatgtctgacactttatactggaaggggtggtgaacttcaaaaaattggggatctaggtgcggtgcaggcagccgcaatgcgagattccatacactactaccctggtaatgatctccaccctgacctggaggagccatcctctctaggggtgtaagattttgtatggtttattcagaagtgccaaatttcagtgaacccaacccagattatcgaggacagcagaacaaaggggcacagagtgaacagaagaataattccatgaatagtaatatgggtacaggtacatttggaccagtgggaaatggtgttcacactggccctgaatcaagggaacaccagttttcacatgctggcagaagcaatggccggggacttataaatccacaactacaaggaacagctagtaatcaaacagtgatgaccacaataagtaatggcagggaccctcggagagcctttaaaagatgacctatgctaaatactcatgtgtagtttttatactacatgccctacttgaacacttattgcacttttatttattgttaactgtgaaaagtacgtcctttattgggtttccttttatattcttggtttgttaagaagaatggtttgtttttatagcaaaactgttaagctgctcgagtctcctgttgaagaatgggaacactgaaaagtaggggcatttatttttagagtaaaaagattattggatagcctttaaaaaacctgcacccatttcatgggtgagttacttaagacatcagctttatagcctctatgagtctatcttctgtataagttttgtaatatttaacataaggcttaatgggagatgttcttttgtcttgtattcagatattgccaactaaagcaataaccatcaaaaaacacaagaacttgtcaatgctagcagtaatttttgagtgtttgtggctctcggaatgattgacttcgttcagtgactactattaagattttccaaggactgactcatcccaaatttttgttgtattaccaaaaaaacagattccttatcagaatttggaatagaatgtgatctctattgcaacaagtaattttaaaagaaagctacatttattttagagtagtgctcctaacatgtattatcaactttgtggattacattggaggaaaatttaaaactggggccttgaatatttattttttgaaactaccatgttaaatactgaagtataatttgggggagttataaagttatgataaacattcatctgattattttaaacaatagttgtggtagataaacatactggaggtgagtaaaattgaattcatatagtaacatgcagtctgaagtcctagttacttaataggtactcagcctggagtgaaaatcctgggtactgactttgagaggagtgagtgtgcatgttgtcaaagtttctgaacacagttcacatagccttattagcaaaagttttaagaaatggctctatcaaagaagcaattgcagctttattcagaaatataaaagtggaatttatgtacatgtcataagtggtacccacttcccctttttactgtagggtggataactcttaggatttaactctttgaatattatctcttgaataaagcatgtgttaatgttaacaaacctacgtaatttttgccctttcaatgacttacagtggagagccagtacatcttaactactgttgtagtgatggtatcaacctcatggttacttagctctgcatttgttgctttgttttttttccacttcaaatcacaaaataagtagattttgttttctgaaaactccatagcatttgaatacaaaaagttgtgccagattgtttgccctaattcactgtgtttaacaaatatttcagtacacactatgtattaggcactgtgtggaaagtgttaaggggtagacaagataccgaataatctccacaagtttatttgtggtctatagtacttttgtaactggggttacaaaaattatagaaatttttttcctttgttcatatgcatattcatgattataatttggctttgtttgtgattaatgttttcttaagattttcacattatagaatacctcaaaagaagttgtctaaggactgggatagagagtatgtttcataaaattgtagatgtttagaatttttaaaaaccctacaaattagtatatgattgttttatataagtaagataggagcaacactttaaattatttgtgggagaatacagcattaaaggtgattttaaaagaaaaaaaaaaaaaaaaaaaaaaaaaaaaaaaaaaaaa

SEQ ID NO: 278 - DNA, 760 bp, Homo sapiens
gagttttcatttgtggtgagattctctcccaggccacaagacatttcctgctcggaaccttgtttactaatttccactgcttttaaggccctgcactgaaaatgcaagctcaggcgccggtggtcgttgtgacccaacctggagtcggtcccggtccggccccccagaactccaactggcagacaggcatgtgtgactgtttcagcgactgcggagtctgtctctgtggcacattttgtttcccgtgccttgggtgtcaagttgcagctgatatgaatgaatgctgtctgtgtggaacaagcgtcgcaatgaggactctctacaggacccgatatggcatccctggatctatttgtgatgactatatggcaactctttgctgtcctcattgtactctttgccaaatcaagagagatatcaacagaaggagagccatgcgtactttctaaaaactgatggtgaaaagctcttaccgaagcaacaaaattcagcagacacctcttcagcttgagttcttcaccatcttttgcaactgaaatatgatggatatgcttaagtacaactgatggcatgaaaaaaatcaaatttttgatttattataaatgaatgttgtccctgaacttagctaaatggtgcaacttagtttctccttgctttcatattatcgaatttcctggcttataaactttttaaattacatttgaaatataaaccaaatgaaatattttaactgataaaaaaaaaaaaaaaaaataaaaaa

SEQ ID NO: 279 - DNA, 1787 bp, Homo sapiens
ggtagcaggaggctggaagaaaggacagaagtagctctggctgtgatggggatcttactgggcctgctactcctggggcacctaacagtggacacttatggccgtcccatcctggaagtgccagagagtgtaacaggaccttggaaaggggatgtgaatcttccctgcacctatgaccccctgcaaggctacacccaagtcttggtgaagtggctggtacaacgtggctcagaccctgtcaccatctttctacgtgactcttctggagaccatatccagcaggcaaagtaccagggccgcctgcatgtgagccacaaggttccaggagatgtatccctccaattgagcaccctggagatggatgaccggagccactacacgtgtgaagtcacctggcagactcctgatggcaaccaagtcgtgagagataagattactgagctccgtgtccagaaactctctgtctccaagcccacagtgacaactggcagcggttatggcttcacggtgccccagggaatgaggattagccttcaatgccaggctcggggttctcctcccatcagttatatttggtataagcaacagactaataaccaggaacccatcaaagtagcaaccctaagtaccttactcttcaagcctgcggtgatagccgactcaggctcctatttctgcactgccaagggccaggttggctctgagcagcacagcgacattgtgaagtttgtggtcaaagactcctcaaagctactcaagaccaagactgaggcacctacaaccatgacataccccttgaaagcaacatctacagtgaagcagtcctgggactggaccactgacatggatggctaccttggagagaccagtgctgggccaggaaagagcctgcctgtctttgccatcatcctcatcatctccttgtgctgtatggtggtttttaccatggcctatatcatgctctgtcggaagacatcccaacaagagcatgtctacgaagcagccagggcacatgccagagaggccaacgactctggagaaaccatgagggtggccatcttcgcaagtggctgctccagtgatgagccaacttcccagaatctgggcaacaactactctgatgagccctgcataggacaggagtaccagatcatcgcccagatcaatggcaactacgcccgcctgctggacacagttcctctggattatgagtttctggccactgagggcaaaagtgtctgttaaaaatgccccattaggccaggatctgctgacataattgcctagtcagtccttgccttctgcatggccttcttccctgctacctctcttcctggatagcccaaagtgtccgcctaccaacactggagccgctgggagtcactggctttgccctggaatttgccagatgcatctcaagtaagccagctgctggatttggctctgggcccttctagtatctctgccgggggcttctggtactcctctctaaataccagagggaagatgcccatagcactaggacttggtcatcatgcctacagacactattcaactttggcatcttgccaccagaagacccgagggaggctcagctctgccagctcagaggaccagctatatccaggatcatttctctttcttcagggccagacagcttttaattgaaattgttatttcacaggccagggttcagttctgctcctccactataagtctaatgttctgactctctcctggtgctcaataaatatctaatcataacagcaaaaaaaaaaaaaaaaaaa

SEQ ID NO: 280 - DNA, 1485 bp, Homo sapiens
tccctgggactgcgtcactggtgcgcgccgcgggtcagggcgcaatggcggcgctgggcggggatgggctgcgactgctgtcggtgtcgcggccggagcggccgcccgagtcggcggcgctgggcggcctgggccccgggctgtgctgctgggtgtcagtgttctcctgcctcagcctcgcctgctcctacgtgggcagcctctacgtctggaagagcgaactgcccagggaccatcccgcggtcatcaagcgacgcttcaccagcgtcctggtggtgtccagtctctcacccctgtgcgtgctgctctggagggaactcacaggcatccagccaggcacatccctgctcaccctgatgggcttcaggctggagggcattttcccagcggcgctgctgcccctgttgctgaccatgattcttttcctgggcccactgatgcagctctctatggattgcccttgtgacctggcagatgggctgaaggttgtcctggccccccgctcctgggcccgctgcctcacagacatgcgttggctgcggaaccaagtgatcgccccgctgacagaggagctggtgttccgggcctgtatgctgcccatgttagcaccgtgcatgggcctgggccctgctgtgttcacctgcccgctcttttttggagttgcccattttcaccatattattgagcagctgcgtttccgccagagcagcgtggggaacatcttcttgtctgctgcgttccagttctcctacacagctgtcttcggtgcctacactgctttcctcttcatccgcacaggacacctgattgggccggttctctgccattccttctgcaattacatgggtttcccagctgtttgcgcggccttggagcacccacagaggcggcccctgctggcaggctatgccctgggtgtgggactcttcctgcttctgctccagcccctcacggaccccaagctctacggcagccttcccctttgtgtgcttttggagcgggcaggggactcagaggctcccctgtgctcctgacctatgctcctgggatacgctatgaactctcaccggctccccaagccctccccaccaaggggtactgcaggggaagggctggctggggtccccgaagatctcaggaatttttgtagggattgaagccagagctagttgcgtcccagggaccaagagaaagaagcagatatccaaagggtgcagccccttttgaaaggggtgtttacgagcagctgtgagtgaggggacaaggggcaggtcccaggagccacacactcccttcctcactttggactgctgcttctcttagctcctctgcctctgaaaagctgctcggggttttttatttataaaacctctccccaccccccaccccccaacttcctgggttttctcattgtctttttgcatcagtactttgtatgggatattaaagagatttaacttgggtaacatggcttgggcctttggg

SEQ ID NO: 281 - DNA, 6217 bp, Homo sapiens; identical to SEQ ID NO: 148

SEQ ID NO: 282 - DNA, 2162 bp, Homo sapiens
gggctgcgctgtccagctgtggctatggccccagccccgagatgaggagggagagaactaggggcccgcaggcctgggaatttccgtcccccaccaagtccggatgctcactccaaagtctcagcaggcccctgagggagggagctgtcagccagggaaaaccgagaacaccatcaccatgacaaccagtcaccagcctcaggacagatacaaagctgtctggcttatcttcttcatgctgggtctgggaacgctgctcccgtggaattttttcatgacggccactcagtatttcacaaaccgcctggacatgtcccagaatgtgtccttggtcactgctgaactgagcaaggacgcccaggcgtcagccgcccctgcagcacccttgcctgagcggaactctctcagtgccatcttcaacaatgtcatgaccctatgtgccatgctgcccctgctgttattcacctacctcaactccttcctgcatcagaggatcccccagtccgtacggatcctgggcagcctggtggccatcctgctggtgtttctgatcactgccatcctggtgaaggtgcagctggatgctctgcccttctttgtcatcaccatgatcaagatcgtgctcattaattcatttggtgccatcctgcagggcagcctgtttggtctggctggccttctgcctgccagctacacggcccccatcatgagtggccagggcctagcaggcttctttgcctccgtggccatgatctgcgctattgccagtggctcggaactatcagaaagtgccttcggctactttatcacagcctgtgctgttatcattttgaccatcatctgttacctgggcctgccccgcctggaattctaccgctactaccagcagctcaagcttgaaggacccggggagcaggagaccaagttggacctcattagcaaaggagaggagccaagagcaggcaaagaggaatctggagtttcagtctccaactctcagcccaccaatgaaagccactctatcaaagccatcctgaaaaatatctcagtcctggctttctctgtctgcttcatcttcactatcaccattgggatgtttccagccgtgactgttgaggtcaagtccagcatcgcaggcagcagcacctgggaacgttacttcattcctgtgtcctgtttcttgactttcaatatctttgactggttgggccggagcctcacagctgtattcatgtggcctgggaaggacagccgctggctgccaagcctggtgctggcccggctggtgtttgtgccactgctgctgctgtgcaacattaagccccgccgctacctgactgtggtcttcgagcacgatgcctggttcatcttcttcatggctgcctttgccttctccaacggctacctcgccagcctctgcatgtgcttcgggcccaagaaagtgaagccagctgaggcagagaccgcaggagccatcatggccttcttcctgtgtctgggtctggcactgggggctgttttctccttcctgttccgggcaattgtgtgacaaaggatggacagaaggactgcctgcctccctccctgtctgcctcctgccccttccttctgccaggggtgatcctgagtggtctggcggttttttcttctaactgacttctgctttccacggcgtgtgctgggcccggatctccaggccctggggagggagcctctggacggacagtggggacattgtgggtttggggctcagagtcgagggacggggtgtagcctcggcatttgcttgagtttctccactcttggctctgactgatccctgcttgtgcaggccagtggaggctcttgggcttggagaacacgtgtgtctctgtgtatgtgtctgtgtgtctgcgtccgtgtctgtcagactgtctgcctgtcctggggtggctaggagctgggtctgaccgttgtatggtttgacctgatatactccattctcccctgcgcctcctcctctgtgttttttccatgtccccctcccaactccccatgcccagtttttacccatcatgcaccctgtacagttgccacgttactgccttttttaaaaatatatttgacagaaaccaggtgccttcagaggctctctgatttaaataaacctttcttgttttttt

SEQ ID NO: 283 - protein, 251 aa, Homo sapiens
AAGCTGTGGTGCCCACAGAGAGTCACTCTGGTGCTTGTGTCCCCACCCCACCCCTGAAGTGAAGAAAACGACCGTGAGGCACCCGGGAGCAGCCAGGATTGATGAACGCCACCAACACGCATCCCCCAAAGTTCCCTGAAGAACAAGTTCTACTCTTGCCAAAGAAATGCCTGGCCTGGAGAGCTCTCCTGGAAGCCAGGATGCCATCGTGAGCCAGGGACTGCTGTGCATGCCTCTGCATGAGAAGAAGC

SEQ ID NO: 284 - DNA, 2162 bp, Homo sapiens; identical to SEQ ID NO: 282

SEQ ID NO: 285 - protein, 1123 aa, Homo sapiens
CTGGCCCTCCTGGTCCTCCTGGCCCACCTGGCCTGTGTGACCCCTCCCAGTGTGCGTACTTTGCCAGCCTTGCTGCCCGGCCAAGTAATGTGAAGGGCCCATAGAAGATTCTAGATCATCAAAACACTACTATGGATTTCTGAAACTTGAACTCGGAGCCCATTGGGAAGCCAGAAGCCTTGAAACATTTCAAATCCTTCTTCTCTCTCCCCTTCCTACTTCCCGCCTTTTCTTCCTGCTTCCCCTCTTTCTAGTCTTTTCTCCTTGCCTGCCTTAATTGTCTTTTCCCGTCCTCAGAGACCTCACAGTTATTAAAACCAACAGATACTGTCAGACAGTCAGGTTATTATTAATATTATTGTTATTGTTTGCTGTTATTTCAAAGGCTAATAGTTTTGAGGGAGCTCCTGGTGGACAGGAAGCAGTTTCCTGGCTCAGCTNCCCTGTCATCACTGGCTGAAGTGTGACAGCCAATTCTTGAGGAACCTCGGTGCTATGAACCGTGACCATGTATGNACTTGTTGATGTACNCNTTCCTGGAAAGAACGTTAAGGAGGACATGAATGTGTGTTCCCTAGTGTCCAAAGATGGCCAGGAAAGTAGTTGAATCACNTCTCAAGAGATGACGAGAGAGATTGACGTAAAGATATGCCCGGAGAAAGCACTGGGTAAACGCTAGATTGNGAGTGCTCTGGCTAGCCAAACCAAAGGCATTTGGAATTGTGCGCTAAAAGTGAACCCAGGGGGTTGNGCAGCTCTCCACTTGGTAGGGAATTGTGGAGAGTTAGGTGGTGCGGTAATTGACGTGATGNNTGGGCACCTTGACNNGATCTCGCTACGGGGGGGGCCCCCCTTCTATAAAGNATGCGCTTCAGCAGTACGAAGNNNNNNNNNNNNNNNNNNNNNNNNNNNNNNNNNNNNNNNNNNGGNNGNGNNNNNNNNNNNNNNNNNNNNNNNNNNNNNNNNNNNNGNNNNNNGNNNGNNNNNNNNNNNNNNNNNNNNNGNNNNNNNGNNNGGGGGGGGGGGGGGGGGGGGGGGNNGGGGGGNGGGGGNGGGGGGGGGGGGGGGGGGGGGGGGGGGGGGGGGGGGGGGGGGGGGGGGGGGGGGGGGGGGGGGGGGGGGT

SEQ ID NO: 286 - DNA, 1978 bp, Homo sapiens
gggagggtacttagggccggggctggcccaggctacggcggctgcagggctccggcaaccgctccggcaacgccaaccgctccgctgcgcgcaggctgggctgcaggctctcggctgcagcgctgggtggatctaggatccggcttccaacatgtggcagctctgggcctccctctgctgcctgctggtgttggccaatgcccggagcaggccctctttccatcccctgtcggatgagctggtcaactatgtcaacaaacggaataccacgtggcaggccgggcacaacttctacaacgtggacatgagctacttgaagaggctatgtggtaccttcctgggtgggcccaagccaccccagagagttatgtttaccgaggacctgaagctgcctgcaagcttcgatgcacgggaacaatggccacagtgtcccaccatcaaagagatcagagaccagggctcctgtggctcctgctgggccttcggggctgtggaagccatctctgaccggatctgcatccacaccaatgcgcacgtcagcgtggaggtgtcggcggaggacctgctcacatgctgtggcagcatgtgtggggacggctgtaatggtggctatcctgctgaagcttggaacttctggacaagaaaaggcctggtttctggtggcctctatgaatcccatgtagggtgcagaccgtactccatccctccctgtgagcaccacgtcaacggctcccggcccccatgcacgggggagggagatacccccaagtgtagcaagatctgtgagcctggctacagcccgacctacaaacaggacaagcactacggatacaattcctacagcgtctccaatagcgagaaggacatcatggccgagatctacaaaaacggccccgtggagggagctttctctgtgtattcggacttcctgctctacaagtcaggagtgtaccaacacgtcaccggagagatgatgggtggccatgccatccgcatcctgggctggggagtggagaatggcacaccctactggctggttgccaactcctggaacactgactggggtgacaatggcttctttaaaatactcagaggacaggatcactgtggaatcgaatcagaagtggtggctggaattccacgcaccgatcagtactgggaaaagatctaatctgccgtgggcctgtcgtgccagtcctgggggcgagatcggggtagaaatgcattttattctttaagttcacgtaagatacaagtttcagacagggtctgaaggactggattggccaaacatcagacctgtcttccaaggagaccaagtcctggctacatcccagcctgtggttacagtgcagacaggccatgtgagccaccgctgccagcacagagcgtccttccccctgtagactagtgccgtagggagtacctgctgccccagctgactgtggccccctccgtgatccatccatctccagggagcaagacagagacgcaggaatggaaagcggagttcctaacaggatgaaagttcccccatcagttcccccagtacctccaagcaagtagctttccacatttgtcacagaaatcagaggagagatggtgttgggagccctttggagaacgccagtctcccaggccccctgcatctatcgagtttgcaatgtcacaacctctctgatcttgtgctcagcatgattctttaatagaagttttattttttcgtgcactctgctaatcatgtgggtgagccagtggaacagcgggagacctgtgctagttttacagattgcctcctaatgacgcggctcaaaaggaaaccaagtggtcaggagttgtttctgacccactgatctctactaccacaaggaaaatagtttaggagaaaccagcttttactgtttttgaaaaattacagcttcaccctgtcaagttaacaaggaatgcctgtgccaataaaagttttctccaacttgaa

SEQ ID NO: 287 - DNA, 3693 bp, Homo sapiens
cgcgccccgggctcggccgacccggcggggatctaggggtgggcgacttcgcgggaccgtggcgcatgtttcctgggagttactgatcatcttctttgaagaaacatgaagttacactatgttgctgtgcttactctagccatcctgatgttcctgacatggcttccagaatcactgagctgtaacaaagcactctgtgctagtgatgtgagcaaatgcctcattcaggagctctgccagtgccggccgggagaaggcaattgctcctgctgtaaggagtgcatgctgtgtcttggggccctttgggacgagtgctgtgactgtgttggtatgtgtaatcctcgaaattatagtgacacacctccaacttcaaagagcacagtggaggagctgcatgaaccgatcccttctctcttccgggcactcacagaaggagatactcagttgaattggaacatcgtttctttccctgttgcagaagaactttcacatcatgagaatctggtttcatttttagaaactgtgaaccagccacaccaccagaatgtgtctgtccccagcaataatgttcacgcgccttattccagtgacaaagaacacatgtgtactgtggtttattttgatgactgcatgtccatacatcagtgtaaaatatcctgtgagtccatgggagcatccaaatatcgctggtttcataatgcctgctgcgagtgcattggtccagaatgtattgactatggtagtaaaactgtcaaatgtatgaactgcatgttttaaagaagacaaatgcaaaccaaagcaacttagtaaaataataggtataaaaagttattctgtaagtctgttggttgtatcttgtatcagaatcccagtaagttaagttgtaaagactttggaataagtttcttttaaaaatatgacatagccagtgatgtgtttaattatataactgttcttactgattttattgccccctagcaataagccctttcctttgaatacatgtacaactttggtcatatgagaagcaggtgcgcagagaattccttgaaagatctgaggtttttaacataaagtctgatgtggttttcctctagcattccaaaaggtttttgctttgaaagtgttagcagaagcatgttgatgtgaattatgatttcttcatgtgctactgttagcacactgagtttttatagttgcacatcattcctcattgtgccttgttttatccattttataaatagagtagatatttgatataccactctgataactcatataaaaatatcatcataaaaagcttaatttcatcccttttatgttggttttaaaaggtaaatgcttaccatattttataattgagaactcttacatagtagaatccattctataatacatgtgttgacaaagctttagagaaagtttcctattctcttccatttcccctgcccaaagtgctgacataggcagtgatgaagaatctttaccaagattttcagggtgtacctatgaaattgctttaaatgcactgctggtgtaaataattagcaagcaaaagcgtttctgtgacttcaggtaccagcttaaagagcactagggatggggaacgaatgccaaatcagactccacctagagcaccaggaaacagcttgtaccctggtagggaaatggtgtcgctgaaaggggaggctgagccagtgcgagactgaacttgtgcagccttagccaagacaaagcagtgtttttcagcagacggctgatgggacaggaattgaagaagagaattgactcgtatgaacaggacagggtgaaaatgctgggaattataatgggaaacaaaactatctatgttcatattttgtaatatttcatttgttaagtttatatctggatataatgttctttttaaacaagtataatcatatcgtcggaggttaagattatgaaattttaaaatctctattcaagatgatgttcactccaaatacactacagaatttagtcaacattttatataatgtttcaataaatgtttctttcaataaagatactatgtgcccttcatagtaataaaatctcaatcttaaagcatgaatctaaaacataaatatttatattacagactcaattttacaaaattactaattgctctagtgcatatttgaactacaagcaactttttaggaatacctctttatacgtctacatattttagtatataaaaatagataatgctcttggacacattttgtattattcatgatctgaatagtagttagttaaaagatcatttgtaatattatgatcaactgttataaattaaggtcttaataccttttctgctctttcaaataactctaatgaatattcaagatattttagccttttaaaaagttgagatttagctcatggatatattttttggtagggaaacattagggtctccttttcttccttttacctagaatgcctcatttaaaagtgccttgaaaacatttagctccccttcttcatgagcatctgtagagctgaaagtattctggaactttagacagaaagctgaaaggaatctgcagtctcctgctgcagttcaactctgctgtttttcagtcatttcctactgtgagtggagtgatgtttgtgtgtgtgttggcaacatgcctaatgttttcttaatgatgacaacaaatattttaaaactgcatttatcattttttaggtcttcattaaattttaaaatgtaatatctgtttcccaccccctacattaggaggataatttcttaaaccacattgttttaattgatttttcttatcttgatttctttcattagaaactatccctaaatgtaaagatcttttgccttcaaatttggcttattttttctgatttatgagggtttgaaagaaagaattcacctaaaagattccatttccagttttataatgtatttcaggttctgaataacaatatttttccaaattgaaagtaaatattcaagaagttgatagcctggttaaaagttagatcctctattaccattctaagcacattcacttctatattgaagttttggtaaaaattcttttttcttttttaataaaaaattaggttattactttttttataaccagatttttaaagcactaggttttaaatcagtgggtatcataaaagccatatataaaagatcctttcttatagtaagacttgtgcttgttagcaggtttttctgttagtttttcccccataacatttaattattactaaaattgtatttacaatagtggtgccaaatcaaatggtaatttaaataaaatctattctgtgtttatgtagggtggtataaaaaagaggtcttcatttagacatgtgatttctaaaattccagaaagcaaaattgataagatgttagaaatttggaccgttatttataatcagggtagcattaaaatggagaaaagaaagttttctgaaaaaatgcagtaaatataagccacatttctaaagtttatttttatgaaagcttcttttaagattttgaaatctattctgcattcccaagagtttatgtttattgtattttatatgatctacaacatataaaattgtgtatttttctttggttgtccctattaacaaaaaagtattttaataaaaaattgaaatgaaaaaaaaaaaaaaaaaaaaaaa

SEQ ID NO: 288 - DNA, 3785 bp, Homo sapiens
gcggcggcggcggcggcggcggcagcggcggccaagcggccaggttggcggccggggctccgggccgcgcgaggccacggccacgccgcgccgctgcgcacaaccaacgaggcagagcgccgcccggcgcgagactgcggccgaagcgtggggcgcgcgtgcggaggaccaggcgcggcgcggctgcggctgagagtggagcctttcaggctggcatggagagcttaaggggcaactgaaggagacacactggccaagcgcggagttctgcttacttcagtcctgctgagatactctctcagtccgctcgcaccgaaggaagctgccttgggatcagagcagacataaagctagaaaaatttcaagacagaaacagtctccgccagtcaagaaaccctcaaaagtattttgccatggatatagaagatgaagaaaacatgagttccagcagcactgatgtgaaggaaaaccgcaatctggacaacgtgtcccccaaggatggcagcacacctgggcctggcgagggctctcagctctccaatgggggtggtggtggccccggcagaaagcggcccctggaggagggcagcaatggccactccaagtaccgcctgaagaaaaggaggaaaacaccagggcccgtcctccccaagaacgccctgatgcagctgaatgagatcaagcctggtttgcagtacacactcctgtcccagactgggcccgtgcacgcgcctttgtttgtcatgtctgtggaggtgaatggccaggtttttgagggctctggtcccacaaagaaaaaggcaaaactccatgctgctgagaaggccttgaggtctttcgttcagtttcctaatgcctctgaggcccacctggccatggggaggaccctgtctgtcaacacggacttcacatctgaccaggccgacttccctgacacgctcttcaatggttttgaaactcctgacaaggcggagcctcccttttacgtgggctccaatggggatgactccttcagttccagcggggacctcagcttgtctgcttccccggtgcctgccagcctagcccagcctcctctccctgtcttaccaccattcccacccccgagtgggaagaatcccgtgatgatcttgaacgaactgcgcccaggactcaagtatgacttcctctccgagagcggggagagccatgccaagagcttcgtcatgtctgtggtcgtggatggtcagttctttgaaggctcggggagaaacaagaagcttgccaaggcccgggctgcgcagtctgccctggccgccatttttaacttgcacttggatcagacgccatctcgccagcctattcccagtgagggtcttcagctgcatttaccgcaggttttagctgacgctgtctcacgcctggtcctgggtaagtttggtgacctgaccgacaacttctcctcccctcacgctcgcagaaaagtgctggctggagtcgtcatgacaacaggcacagatgttaaagatgccaaggtgataagtgtttctacaggaacaaaatgtattaatggtgaatacatgagtgatcgtggccttgcattaaatgactgccatgcagaaataatatctcggagatccttgctcagatttctttatacacaacttgagctttacttaaataacaaagatgatcaaaaaagatccatctttcagaaatcagagcgaggggggtttaggctgaaggagaatgtccagtttcatctgtacatcagcacctctccctgtggagatgccagaatcttctcaccacatgagccaatcctggaagaaccagcagatagacacccaaatcgtaaagcaagaggacagctacggaccaaaatagagtctggtgaggggacgattccagtgcgctccaatgcgagcatccaaacgtgggacggggtgctgcaaggggagcggctgctcaccatgtcctgcagtgacaagattgcacgctggaacgtggtgggcatccagggatccctgctcagcattttcgtggagcccatttacttctcgagcatcatcctgggcagcctttaccacggggaccacctttccagggccatgtaccagcggatctccaacatagaggacctgccacctctctacaccctcaacaagcctttgctcagtggcatcagcaatgcagaagcacggcagccagggaaggcccccaacttcagtgtcaactggacggtaggcgactccgctattgaggtcatcaacgccacgactgggaaggatgagctgggccgcgcgtcccgcctgtgtaagcacgcgttgtactgtcgctggatgcgtgtgcacggcaaggttccctcccacttactacgctccaagattaccaagcccaacgtgtaccatgagtccaagctggcggcaaaggagtaccaggccgccaaggcgcgtctgttcacagccttcatcaaggcggggctgggggcctgggtggagaagcccaccgagcaggaccagttctcactcacgccctgacccgggcagacatgatggggggtgcagggggctgtgggcatccagcgtcatcctccagaacctcacatctgaactgggggcaggtgcataccttggggagggagtagggggacacgggggaccaccaggtgtccacggttgtccccagcatctcacatcagacctggggcaggtgcgcagtgtggggaggggatggggtgcgtcagggcccagcatcgccgcctggcatctctctgccgcagcatttccccttctgaaccgtccagtgactgctttcaatctcggtttacgtttagaaattgagttctactgagtagggcttccttaagtttaggaaaatagaaattactttgtgtgaaattcttgaataaataatttattcagagctaggaatgtggtttataaaataggaagtaattgtgtcaggtcacttttatgccacattattttaattgcaaaaaagcatctatatatggaggagggtgggaaaatagaggtaggaaatagtagcctaaaggaaatcgccacacgtctgtctaaacttaggtctcttttctccgtaggtacctccctgggtagttccacacactaggttgtaacagtctctccctgaggagcagactcccagcatggtgtagcgtggccctgtcatgcacatggggtcccgcagcagtgactgtgtgtcctgcagaggcgtgacccaggcccctgtagccctcagcctcctctagaagcttctgtactccttgtaggatcagatcatggaaaacttttctcagtttacttctaagtaatcacagataatacatggccagtaatcccaggctggccattcattcaggttttttaaaggatatttaacttttatggactagaaggaatcacgagggctactgcacaatacatggcctaagttccctctgttccttcctctgaatcgaatggatgtgggtgaccgcccgaaggccttcacaggatggaagtagaatgatttcagtagatactcattcttggaaaatgccatagttttaaattattgtttccagctttatcaaagacatgtttgaaaaataaaaagcatccaagtgagagctggtgagaccacgtgctgctggcgtagtgtaggccagacattgacagtcctgacgggagctcagggctgcccagcgcccagcgtgcacgggacggccccacgacagagggagtcagcccgggaggtcaggagcgcggcgggcgagggccctgtgtggaccacctccaccaagc

SEQ ID NO: 289 - DNA, 3023 bp, Homo sapiens
ccatttaatgtatagtttatttctaggttttccttctgtgtttttagacactgaaatgcctaaatattgatttgtttattattttgtttctttatttttccagctcccggtaaaacacaatttatttctctgaaacctaaaatccctctcagcccagaagtgacacacaccaaacctgctcccaagcagacaccacgtgctcctcctaagccaaaaacatcaccacgcccaagaatcccacaaacacaaccagttcctaaggtgccccagcgtgttactgcaaaaccaaaaacgtcaccaagtccagaagtgtcatacaccacacctgctcctctagagacacgaggcatcccttttatacccatgatttccccaagtcctagtcaagaggaactacagaccactctggaagaaacagaccaatccacccaagaacctttcacaactaagattccacgaacaactgaactagcaaagacaactcaggcgccacacagattttatactactgtgaggcccagaacatctgacaagccacacatcagacctgttctgaataggacaactacaagacctactaggcccaaacccagtgggatgcccagtgggaatggagtgggaacaggggtcaagcaagcacccaggccatcaggtgctgatagaaatgtatcagtggactctacccaccccactaaaaagccagggactcgccgcccacccttgccacccagacctacacacccacgaagaaaacctttaccaccaaataatgtcactggaaagccaggaagtgcaggaatcatttcatcaggcccaataactacaccacccctgaggtcaacacccaggcctactggaactcccttggagagaatagagacagatataaagcaaccaacagttcctgcctctggagaagaactggaaaatataactgactttagctcaagcccaacaagagaaactgatcctcttgggaagccaagattcaaaggacctcatgtgcgatacatccaaaagcctgacaacagtccctgctccattactgactctgtcaaacggttccccaaagaggaggccacagaggggaatgccaccagcccaccacagaacccacccaccaacctcactgtggtcaccgtggaagggtgcccctcatttgtcatcttggactgggaaaagccactaaatgacactgtcactgaatatgaagttatatccagagaaaatgggtcattcagtgggaagaacaagtccattcaaatgacaaatcagacattttccacagtagaaaatctgaaaccaaacacgagttatgaattccaggtgaaacccaaaaacccacttggtgaaggcccggtcagcaacacagtggcattcagtactgaatcagcggacccaagagtgagtgagccagtttctgcaggaagagatgccatctggactgaaagaccctttaattcagactcttactcagagtgtaagggcaaacaatatgtcaaaaggacatggtataaaaaatttgtaggagtgcagctgtgcaactctctcagatacaagatttacttgagcgactccctcacaggaaaattttataacataggtgatcagaggggccatggagaagatcactgccagtttgtggattcatttttagatggacgcactgggcagcaactcacttctgaccagttaccaatcaaagaaggttatttcagagcagttcgccaggaacctgtccaatttggagaaataggtggtcacacccaaatcaattatgttcagtggtatgaatgtgggactacaattcctggaaaatggtagatgctgcacaaagttaccttctgtttcatcattgcaaacaaaaatcattgaaaatactatgccgcattcatttaaagctattttgtttactatgtataaaagtctacaatctaattaatagcaatactagatgtttattattagaaaagattgctgagagtatttatcaggttttacaaagtcattttaagaaagcaagatactgatgttaacagaataacatttttggggaagctggctccctattcatggtattttaagagatcatttgtatattatttatcacactgttgtaatgatgttttgagatacttttataacaaaattaacatcaaaaaggtatatactttttaaaaaaaatttacttttattgatgtgtactcttcctattgatgagttaattccataaatctctacttagtttaacttattggatcaaattatcttcagcatgtatatctggggaaaaaaggtccgaattttcacatttatatttaaacttcaattttttatatttaaacttcaattttttagcaacagctgaatagctttgcggaggagtttaatagttacacattcatgctaatatacatttcctttaaacatccacaaattcttaaaaagattgaatcagtaaatttcatttcagctaaaaatggagtctaatatattgtttcaaaagatacatttttacccaccataaatgttacaatatctgaatatgctttgtcaaactatccctttatgcaatcgtcttcatattgtttttatgattctaatcaagctgtatgtagagactgaatgtgaagtcaagtctgagcacaaaaagataatgcacgatgagattgcctaccattttataggatatttactatgtatttatacgttaagacctctatgaatgaatgtatcagagaatgtctttgtaactgtttaattcaatctgtaataaaaatctaactaactaactcatttatttctattaaaaaggtattgtcctttaggcggggaatgggaatccttgctgcactgttgcagtcattctgaaaggacctttccctgtacttacctttcaacatgcttcaatcttatcaacgctacattttgtatttttcaaacaagtataaattctgcaataaagagatgtagttttttttaaaaaaaaaaaaaaaaaaaaaaaaaaaaaaaaaaaaaaaaaa

SEQ ID NO: 290 - DNA, 4122 bp, Homo sapiens
cgggttcgggtggagctgagccggagacaggcaattgtgaaaaacttcaggacaaaaatgtttcatttaaggacttgtgctgctaagttgaggccattgacggcttcccagactgttaagacattttcacaaaacagaccagcagcagctaggacatttcaacagattcggtgctattctgcacctgttgctgctgagccctttctcagtgggactagttcgaactatgtggaggagatgtactgtgcttggctggaaaaccccaaaagtgtacataagtcatgggacattttttttcgcaacacgaatgccggagccccaccgggcactgcctaccagagtccccttcccctgagccgaggctccctggctgctgtggcccatgcacagtccctggtagaagcacagcccaacgtggacaagctcgtggaggaccacctggcagtgcagtcactcatcagggcatatcagatacgagggcaccatgtagcacagctggaccccctggggattttggatgctgatctggactcctccgtgcccgctgacattatctcatccacagacaaacttgggttctatggcctggatgagtctgacctcgacaaggtcttccacttgcccaccaccactttcatcgggggacaggaatcagcacttcctctgcgggagatcatccgtcggctggagatggcctactgccagcatattggggtggagttcatgttcatcaatgacctggagcagtgccagtggatccggcagaagtttgagacccctgggatcatgcagttcacaaatgaggagaaacggaccctgctggccaggcttgtgcggtccaccaggtttgaggagttcctacagcggaagtggtcctctgagaagcgctttggtctagaaggctgcgaggtactgatccctgccctcaagaccatcattgacaagtctagtgagaatggcgtggactacgtgatcatgggcatgccacacagagggcggctgaacgtgcttgcaaatgtcatcaggaaggagctggaacagatcttctgtcaattcgattcaaagctggaggcagctgatgagggctccggagatgtgaagtaccacctgggcatgtatcaccgcaggatcaatcgtgtcaccgacaggaacattaccttgtccttggtggccaacccttcccaccttgaggccgctgaccccgtggtgatgggcaagaccaaagccgaacagttttactgtggcgacactgaagggaaaaaggtcatgtccatcctgttgcatggggatgctgcatttgctggccagggcattgtgtacgagaccttccacctcagcgacctgccatcctacacaactcatggcaccgtgcacgtggtcgtcaacaaccagatcggcttcaccaccgaccctcggatggcccgctcctccccctaccccactgacgtggcccgagtggtgaatgcccccattttccacgtgaactcagatgaccccgaggctgtcatgtacgtgtgcaaagtggcggccgagtggaggagcaccttccacaaggacgtggttgtcgatttggtgtgttaccggcgcaacggccacaacgagatggatgagcccatgttcacgcagccgctcatgtacaagcagatccgcaagcagaagcctgtgttacagaagtacgctgagctgctggtgtcgcagggtgtggtcaaccagcctgagtatgaggaggaaatttccaagtatgataagatctgtgaggaagcttttgccagatctaaagatgagaagatcttgcacattaagcactggctggactctccctggcctggcttcttcaccctggacgggcagcccaggagcatgtcctgcccctccacgggtctgacggaggatattctgacacacatcgggaatgtggctagttctgtgcctgtggaaaactttactattcatggagggctgagccggatcttgaagactcgtggggaaatggtgaagaaccggactgtggactgggctctagcggagtacatggcgtttggctcgctcctgaaggagggcatccacattcggctgagcggccaggacgtggagcggggcacattcagccaccgccaccatgtgctccatgaccagaatgtggacaagagaacctgcatccccatgaaccatctctggcccaatcaggccccctatactgtgtgcaacagctcactgtctgagtacggcgtgctgggctttgaagctgggcttcgcatggccagtcctaatgccctggtcctctgggaagcccaatttggtgacttccacaacacggcccagtgtatcatcgaccagttcatctgcccgggacaagccaagtgggtgcggcagaatggcatcgtgttgctgctgccccatggcatggagggcatgggtccagaacattcctccgcccgcccagagcggttcttgcagatgtgcaacgatgacccagatgtcctgccagaccttaaagaagccaacttcgacatcaatcagctatatgactgcaattgggttgttgtcaactgctccactcctggcaacttcttccacgtgctacgacgccagatcctgctgccattccggaagccgttaattatcttcacccccaaatccctgttgcgccaccccgaggccagatccagctttgatgagatgcttccaggaacccacttccagcgggtgatcccagaagatggccctgcagctcagaacccagaaaatgtcaaaaggcttctcttctgcaccggcaaagtgtattatgacctcacccgggagcgcaaagcacgcgacatggtggggcaggtggccatcacaaggattgagcagctgtcgccattcccctttgacctcctgctgaaggaggtgcagaagtaccccaatgctgagctggcctggtgccaggaggagcacaagaaccaaggctactatgactacgtgaagccaagacttcggaccaccatcagccgcgccaagcccgtctggtatgccggccggaacccagcggctgctccagccaccggcaacaagaagacccactgacggagctgcagcgcctcctggacacggccttcgacctggacgtcttcaagaacttctcgtagatgctgcctagggttgcttgggccactgccctctccacacccatgactgccccttgcttctcaactaaagaatagtgcctcagcgctgcccacaccaccgtcctcctcgctgtgccaccacccctccctctgctctcataggagttaggctgtcgtccccctccagtgcttggctgccccacaggccacacgctgcccaggctctgctgacttctgagcagttttccaggaggccggggggagcaggaggaggaaaggtagcccccgagggatgtccttggggaggggtcagctctggccccaatcctccccaccagtctcacccactaggataggaactgggccttgtgtgctggcttccgctgtcacccagcaaggcacaggctcctgtatttgagactaggatagcttcatcttgagcctgagccttagaatctgtagaggagcctggagtcggatctagccatggctggcagaggtttctagggtgggccccagccgtggcgtgaactgaggatgacccggggcagctggcaggagagagccttggcctgacctggcacagaaagggcagcttcagtctctgcagtgtccattatctgctgttccttcgagggttccaggctgtgtgtggggcccaagcatgccccacccaccctcctgggcccaggcagcacctggagcccacagagtctgtgtgtagccaggaagccccgctcaggtagccaccgccggggcactggctgctctgtcttggtcctgttaaccctccacctcctctcttggactccctccccaccccaaccactctttctttctcctttaacccaatggagactttctgatgcatcgttttctttgctgtgccaaagcaggtcagaagagggagaggaggggctgggggtgaggggccaggccatggccaaggggccagctgcccctcatttatcactctgaccttcacagggacagatctgatttatttattttggtt

SEQ ID NO: 291 - DNA, 2836 bp, Homo sapiens
ctccctcagcgtccggccgaggcgcggtgtatgctgagccgctgccgcagcgggctgctccacgtcctgggccttagcttcctgctgcagacccgccggccgattctcctctgctctccacgtctcatgaagccgctggtcgtgttcgtcctcggcggccccggcgccggcaaggggacccagtgcgcccgcatcgtcgagaaatatggctacacacacctttctgcaggagagctgcttcgtgatgaaaggaagaacccagattcacagtatggtgaacttattgaaaagtacattaaagaaggaaagattgtaccagttgagataaccatcagtttattaaagagggaaatggatcagacaatggctgccaatgctcagaagaataaattcttgattgatgggtttccaagaaatcaagacaaccttcaaggatggaacaagaccatggatgggaaggcagatgtatctttcgttctcttttttgactgtaataatgagatttgtattgaacgatgtcttgagaggggaaagagtagtggtaggagtgatgacaacagagagagcttggaaaagagaattcagacctaccttcagtcaacaaagccaattattgacttatatgaagaaatggggaaagtcaagaaaatagatgcttctaaatctgttgatgaagtttttgatgaagttgtgcagatttttgacaaggaaggctaattctaaacctgaaagcatccttgaaatcatgcttgaatattgctttgatagctgctatcatgacccctttttaaggcaattctaatctttcataactacatctcaattagtggctggaaagtacatggtaaaacaaagtaaatttttttatgttctttttttggtcacaggagtagacagtgaattcaggtttaacttcaccttagttatggtgctcaccaaacgaagggtatcagctatttttttttaaattcaaaaagaatatcccttttatagtttgtgccttctgtgagcaaaactttttagtacgcgtatatatccctctagtaatcacaacattttaggatttagggatacctgcttcctctttttcttgcaagttttaaatttccaaccttaagtgaatttgtggaccaaatttcaaaggaactttttgtgtagtcagttcttgcacaatgtgtttggtaaacaaactcaaaatggattcttaggagcattttagtgtttattaaataactgaccatttgctgtagaaagatgagaaaacttaagctttgttttactacaacttgtacaaagttgtatgacagggcatattctttgcttccaagatttgggttgggggcactaggggttcagagcctggcagaattgtcagctttagtctgacataatctaagggtatggggcaaggatcacatctaatgcttgtgtccttatactctattatatagtgttattcatgattcagctgatcttaacaaaattcgtagcagtggaaccttgaaatgcatgtggctagatttatgctaaaatgattctcagttagcattttagtaacacttcaaaggtttttttttgtttgttttctagacttaataaaagcttaggattaattagaagaagcaatctagttaaatttcccatttgtattttattttcttgaatacttttttcatagttatttgtttaaaaagatttaaaaatcattgcactttggtcagaaaaataataaatatatcttataaatgtttgattcccttccttgctatttttattcagtagatttttgtttggcatcatgttgaagcaccgaaagataaatgatttttaaaaggctatagagtccaaaggaatattcttttacaccaattcttcctttaaaaatctctgaggaatttgttttcgccttacttttttttcttctgtcacaatgctaagtggtatccgaggttcttaatatgagatttaaaatcttaaaatgtttcttattttcagcacttacatcatttggtacacagggtcaaatagggcaaataattttgtctttgtataatagatttgatatttaaagtcactggaaataggacaagttaatggatgtttttatattttaatagaatcatttatttctatgtgttatgaaattcacttaatgataaatttttcaacatacttgccattagaaaacaaagtattgctaagtactataacatattggccactaaaattcatattgagattatcttggtttcttggaagagataggaatgagttcttatctagtgttgcaggccagcaaatacagaggtggtttaatcaaacagctctagtatgaagcaagagtaaagactaaggtttcgagagcattcctactcacataagtgaagaaatctgtcagataggaatctaaatatttatagtgagattgtgaaagcaaccttaaagttttgaagaagactgatgagactaggtgctttgcttcctttcatcaggtatctttctgtggcatttgagaacagaaaccaagaaacatggtaattactaaattatgaggctttgctttttgtttgcttttaagtagaaaaacatgttggcaacattgagttttggagttgattgagataatatgacttaactagttttgtcattccatttgttaaagatacagtcaccaagaatgttttgagttttttgaaagaccccaatttaagccttgcttatttttaaattatttccattcagtgatgttggatgtatatcagttatttagtaaataatctcaataaattttgtgctgtggcctttgctaaaaaaaaaaaaaaaaaaaaaaaaaaaa

SEQ ID NO: 292 - DNA, 1414 bp, Homo sapiens
ggtaccgtcaagatggcggcgtctgtattaaacaccgtgctgaggcggcttcctatgctatctctcttccgaggttctcacagagttcaggttcccctccagactctttgcaccaaagctccctctgaggaagattctttgtcctcagttcccatttctccttataaggatgagccctggaaatatctggaatcagaagaataccaggagcgatatggttctcgccccgtctgggctgactaccgccgcaaccacaagggtggtgtacccccacagcggactcggaagacatgtattcgtcggaataaagttgttgggaatccctgccccatctgtcgagatcacaagttgcatgttgactttaggaacgtgaagctcttggagcaatttgtctgcgcccacacgggtatcatcttctatgctccatacacaggagtctgtgtgaagcagcacaagcggttgacccaggccatccagaaagccagggatcatggtctcctcatttaccacatcccccaggttgaaccacgggaccttgacttcagtacctctcatggggctgtgagtgctactccgccagcccccaccctggtctcaggtgacccctggtacccatggtacaactggaaacagccaccggagagagaactgtctcgccttcgccggctttaccagggtcatctccaagaagagagtggccccccacctgagtcaatgcccaagatgccccctagaacaccagcggaagcctcctccactgggcagacaggccctcagagtgctctgtaggagctgtagactgggaagagaggccaggcgtggtggctcactcctgtaatcccagcactttgggaagccaaggtgggctgatcacttgatcccaggagtttgagaccagcctgggcaccatggtgaaacctcgtctttaccaaaaaatacaaaaattagctgggtgtggtggtgcacacctgtagtctcaactattggggaggctaaggtaggatcacttgatcccaggaggcggaggttgcagtgagttgcagtcacacccctgcactccagcctgggtgacagctagaccctgtctcaaaaaaaaaaaaaaagactgggaagagagctagagggactaggagataatgtgtatgtaggtttatgtgatgggatatcaccctgaagagttgtgtcttttgtggccagtgacaaatccaggaaatgaatgttgctgatagggataaatcttgaggctgagggcgggtggtacagatgtgtatgggaaaccccaacccctatatattgtaaatagatgggctgggctaaacattgttgccgtttcatacttctaccaactcagcttttacacaataaagctctactgtctctgggtaaaaaaaaaaaaaaaaaaaaaaaaaaaaaa

SEQ ID NO: 293 - DNA, 456 bp, Homo sapiens
acaagcttgtgctggagatggatgggttaagccatgggagaagcagatagctcagactgctgtatctcagtcagatgccccacctcacttaccatgcccactgataccctggaatttctgccagcacagctactacaatcaaggaaagctctgtgcttttccaacatggggtgtgggagaaatggcttaaaagcccaagaaatgcccccttgagaccaggacactagagaaggttgccaaggcaggccagaatcagccaggaactcctgcaaagtcgagagcattctgcctacctgcaagaagaacactgcatactgggcatgcaggtaccaccacctgtcagcagtttctccaggctctgctggtatagccagcccagaacccatcataccagaaaataaccttcagtctaaatcaaatgattcattcatggtcacctgatcagtggcttcagtc

SEQ ID NO: 294 - DNA, 246 bp, Homo sapiens
taatgatgaagactgggcctattcacaacagctctctgcctcaacggtcaggcatgcaattttggtctgcgacatataaccattctgaagcttttgggtgttggagaggaagttggaggagttttagaactgttcccaattaatgggagctccatcgttgagcgggaagatgtgccagcccacgttggtcaaagatatccgcaactattttcaagtgagcccagagtacttctccatgcttctagt

SEQ ID NO: 295 - DNA, 404 bp, Homo sapiens
ttgacaagatggatatcaaaaatagttgctgtgaaaagttagtagtcttcttcaagaagaaaacagttccttttctaatactatcctgtgaaattgcttcacccattcctttattttaaagccaaatgtcagcagaatactgctgtttttatctaaataattttaatatgtaagtattaatgcatttaaaaagatgtctgcgttgagaaatacttcactagtgtactgcctgtgaaaactttgttcagatttctggctaagacaccagtcagtatactggggctgcacattacatacatgtattattttagtcaggtattgttgtagaccaagcctggttataatagagttgactatcactagtttgttatcagttaatttttaattatttccagtttactctc

SEQ ID NO: 296 - DNA, 4350 bp, Homo sapiens; identical to SEQ ID NO: 113

SEQ ID NO: 297 - DNA, 210 bp, Homo sapiens
aattcggaacgaggcctgagtaaggttaggggaagctagggtcaggatggaataaagtcagggttggaatggagtgcatcggaatagaggggtgatcttggtaggttcctattgcccatgggtttgagaaccaggccctgggaagatgagagagtactcagctcctacctggtgcagcatcccttgtagttacagagtcccaagctaggg

SEQ ID NO: 298 - DNA, 5983 bp, Homo sapiens; identical to SEQ ID NO: 275

SEQ ID NO: 299 - DNA, 499 bp, Homo sapiens
aggagtcggtctcagcagaggctgaaggggttcctgccaccagtgagggccaaggggaagcagaagggtctttctccttagcccaggaatcccaggaagccccagtatgtggggtcactgaagagaagctgggacccgaatgttgggtccttgagggtcacctctttggtcaagaaaggcattcagctctaactgctccttgataccacgtggcttggccattgctggtgccaaggctgaccccgaactggcagagccgagtgccctctggtgcaccccaggaaacatctccccaagttccagcgcccttaatgactcttgccaccctgggggcttcaccctaacgcaccacttctctggaaggggaaggccagacacatgccagttggggctgcatgaggcagtcctcagagcagaaggggaccaggccagagcgacctgtgacggggcaaactgcatctcggctgtggagacagaggggctgttagatttggaagac

SEQ ID NO: 300 - DNA, 4839 bp, Homo sapiens
ggaaagctagcggcagaggctcagccccggcggcagcgcgcgccccgctgccagcccattttccggacgccacccgcgggcactgccgacgcccccggggctgccgaggggaggccgggggggcgcagcggagcgcggtcccgcgcactgagccccgcggcgccccgggaacttggcggcgacccgagcccggcgagccggggcgcgcctcccccgccgcgcgcctcctgcatgcggggccccagctccgggcgccggccggagccccccccggccgcccccgagccccccgcgccccgcgccgcgccgccgcgccgtccatgcaccgcttgatgggggtcaacagcaccgccgccgccgccgccgggcagcccaatgtctcctgcacgtgcaactgcaaacgctctttgttccagagcatggagatcacggagctggagtttgttcagatcatcatcatcgtggtggtgatgatggtgatggtggtggtgatcacgtgcctgctgagccactacaagctgtctgcacggtccttcatcagccggcacagccaggggcggaggagagaagatgccctgtcctcagaaggatgcctgtggccctcggagagcacagtgtcaggcaacggaatcccagagccgcaggtctacgccccgcctcggcccaccgaccgcctggccgtgccgcccttcgcccagcgggagcgcttccaccgcttccagcccacctatccgtacctgcagcacgagatcgacctgccacccaccatctcgctgtcagacggggaggagcccccaccctaccagggcccctgcaccctccagcttcgggaccccgagcagcagctggaactgaaccgggagtcggtgcgcgcacccccaaacagaaccatcttcgacagtgacctgatggatagtgccaggctgggcggcccctgcccccccagcagtaactcgggcatcagcgccacgtgctacggcagcggcgggcgcatggaggggccgccgcccacctacagcgaggtcatcggccactacccggggtcctccttccagcaccagcagagcagtgggccgccctccttgctggaggggacccggctccaccacacacacatcgcgcccctagagagcgcagccatctggagcaaagagaaggataaacagaaaggacaccctctctagggtccccaggggggccgggctggggctgcgtaggtgaaaaggcagaacactccgcgcttcttagaagaggagtgagaggaaggcggggggcgcagcaacgcatcgtgtggccctcccctcccacctccctgtgtataaatatttacatgtgatgtctggtctgaatgcacaagctaagagagcttgcaaaaaaaaaaagaaaaaagaaaaaaaaaaaccacgtttctttgttgagctgtgtcttgaaggcaaaagaaaaaaaatttctacagtagtctttcttgtttctagttgagctgcgtgcgtgaatgcttattttcttttgtttatgataatttcacttaactttaaagacatatttgcacaaaacctttgtttaaagatctgcaatattatatatataaatatatataagataagagaaactgtatgtgcgagggcaggagtatttttgtattagaagaggcctattaaaaaaaaaagttgttttctgaactagaagaggaaaaaaatggcaatttttgagtgccaagtcagaaagtgtgtattaccttgtaaagaaaaaaattacaaagcaggggtttagagttatttatataaatgttgagattttgcactattttttaatataaatatgtcagtgcttgcttgatggaaacttctcttgtgtctgttgagactttaagggagaaatgtcggaatttcagagtcgcctgacggcagagggtgagcccccgtggagtctgcagagaggccttggccaggagcggcgggctttcccgaggggccactgtccctgcagagtggatgcttctgcctagtgacaggttatcaccacgttatatattccctaccgaaggagacaccttttcccccctgacccagaacagcctttaaatcacaagcaaaataggaaagttaaccacggaggcaccgagttccaggtagtggttttgcctttcccaaaaatgaaaataaactgttaccgaaggaattagtttttcctcttcttttttccaactgtgaaggtccccgtggggtggagcatggtgcccctcacaagccgcagcggctggtgcccgggctaccagggacatgccagagggctcgatgacttgtctctgcagggcgctttggtggttgttcagctggctaaaggttcaccggtgaaggcaggtgcggtaactgccgcactggaccctaggaagccccaggtattcgcaatctgacctcctcctgtctgtttcccttcacggatcaattctcacttaagaggccaataaacaacccaacatgaaaaggtgacaagcctgggtttctcccaggataggtgaaagggttaaaatgagtaaagcagttgagcaaacaccaacccgagcttcgggcgcagaattcttcaccttctcttcccctttccatctcctttccccgcggaaacaacgcttcccttctggtgtgtctgttgatctgtgttttcatttacatctctcttagactccgctcttgttctccaggttttcaccagatagatttggggttggcgggacctgctggtgacgtgcaggtgaaggacaggaaggggcatgtgagcgtaaatagaggtgaccagaggagagcatgaggggtggggctttgggacccaccggggccagtggctggagcttgacgtctttcctccccatgggggtgggagggcccccagctggaagagcagactcccagctgctaccccctcccttcccatgggagtggctttccattttgggcagaatgctgactagtagactaacataaaagatataaaaggcaataactattgtttgtgagcaacttttttataacttccaaaacaaaaacctgagcacagttttgaagttctagccactcgagctcatgcatgtgaaacgtgtgctttacgaaggtggcagctgacagacgtgggctctgcatgccgccagcctagtagaaagttctcgttcattggcaacagcagaacctgcctctccgtgaagtcgtcagcctaaaatttgtttctctcttgaagaggattctttgaaaaggtcctgcagagaaatcagtacaggttatcccgaaaggtacaaggacgcacttgtaaagatgattaaaacgtatctttcctttatgtgacgcgtctctagtgccttactgaagaagcagtgacactcccgtcgctcggtgaggacgttcccggacagtgcctcactcacctgggactggtatcccctcccagggtccaccaagggctcctgcttttcagacaccccatcatcctcgcgcgtcctcaccctgtctctaccagggaggtgcctagcttggtgaggttactcctgctcctccaacctttttttgccaaggtttgtacacgactcccatctaggctgaaaacctagaagtggaccttgtgtgtgtgcatggtgtcagcccaaagccaggctgagacagtcctcatatcctcttgagccaaactgtttgggtctcgttgcttcatggtatggtctggatttgtgggaatggctttgcgtgagaaaggggaggagagtggttgctgccctcagccggcttgaggacagagcctgtccctctcatgacaactcagtgttgaagcccagtgtcctcagcttcatgtccagtggatggcagaagttcatggggtagtggcctctcaaaggctgggcgcatcccaagacagccagcaggttgtctctggaaacgaccagagttaagctctcggcttctctgctgagggtgcaccctttcctctagatggtagttgtcacgttatctttgaaaactcttggactgctcctgaggaggccctcttttccagtaggaagttagatgggggttctcagaagtggctgattggaaggggacaagcttcgtttcaggggtctgccgttccatcctggttcagagaaggccgagcgtggctttctctagccttgtcactgtctccctgcctgtcaatcaccacctttcctccagaggaggaaaattatctcccctgcaaagcccggttctacacagatttcacaaattgtgctaagaaccgtccgtgttctcagaaagcccagtgtttttgcaaagaatgaaaagggaccccatatgtagcaaaaatcagggctgggggagagccgggttcattccctgtcctcattggtcgtccctatgaattgtacgtttcagagaaattttttttcctatgtgcaacacgaagcttccagaaccataaaatatcccgtcgataaggaaagaaaatgtcgttgttgttgtttttctggaaactgcttgaaatcttgctgtactatagagctcagaaggacacagcccgtcctcccctgcctgcctgattccatggctgttgtgctgattccaatgctttcacgttggttcctggcgtgggaactgctctcctttgcagccccatttcccaagctctgttcaagttaaacttatgtaagctttccgtggcatgcggggcgcgcacccacgtccccgctgcgtaagactctgtatttggatgccaatccacaggcctgaagaaactgcttgttgtgtatcagtaatcattagtggcaatgatgacattctgaaaagctgcaatacttatacaataaattttacaattctttgg

SEQ ID NO: 301 - DNA, 712 bp, Homo sapiens
  misc_feature 205: n = A,T,C or G
tttttttttttttttttttttttttttttttttttttttttttttttttttttaagggaagcaaaactttattccttttggctggaaaaaaaaactaggggggggttgggtacaggacccccatccctcacccctcccaaaaccaaaaaaaacaagcagggcccccaaagggctccctttgcccaagtgaaagcccaaaggtcancggttggctggggaggcaggttaaccccaaccacggcacagggcaggggcggttgcattgacaggcgggcggccagggcggcccaggggccggggttgaggggaaaagggcggggctttttggttagcggggcaagcttgggggctgccggttggcacgggccccaaacttagggcaccacaacccggtaggggctgcctgggatgtgctcgtccccccatttgaccaccagggtgtactcccccttgtccttgagcaggtaggacacgctgtaaagccggttgcccacgtgctttaccaggatctcctgggaggggtccttgggccatgaacccccaccaacaagaatgtgttgcctgctttgcttgaaactactgggaagctgcttttttggcctaggagggctttgctagccccagcccttggccaccaaccttgttgcgtaggaggccccagaccccgggccccatttcctgggggccccggtgggccttggtcagaggttac

SEQ ID NO: 302 - DNA, 7420 bp, Homo sapiens
  misc_feature 3356, 3743, 3962, 3966, 3968, 3976, 3988: n = A,T,C or G
gctgagcctgagcccgacccggggcgcctcccgccaggcaccatggtgcagaagtcgcgcaacggcggcgtataccccggcccgagcggggagaagaagctgaaggtgggcttcgtggggctggaccccggcgcgcccgactccacccgggacggggcgctgctgatcgccggctccgaggcccccaagcgcggcagcatcctcagcaaacctcgcgcgggcggcgcgggcgccgggaagccccccaagcgcaacgccttctaccgcaagctgcagaatttcctctacaacgtgctggagcggccgcgcggctgggcgttcatctaccacgcctacgtgttcctcctggttttctcctgcctcgtgctgtctgtgttttccaccatcaaggagtatgagaagagctcggagggggccctctacatcctggaaatcgtgactatcgtggtgtttggcgtggagtacttcgtgcggatctgggccgcaggctgctgctgccggtaccgtggctggagggggcggctcaagtttgcccggaaaccgttctgtgtgattgacatcatggtgctcatcgcctccattgcggtgctggccgccggctcccagggcaacgtctttgccacatctgcgctccggagcctgcgcttcctgcagattctgcggatgatccgcatggaccggcggggaggcacctggaagctgctgggctctgtggtctatgcccacagcaaggagctggtcactgcctggtacatcggcttcctttgtctcatcctggcctcgttcctggtgtacttggcagagaagggggagaacgaccactttgacacctacgcggatgcactctggtggggcctgatcacgctgaccaccattggctacggggacaagtacccccagacctggaacggcaggctccttgcggcaaccttcaccctcatcggtgtctccttcttcgcgctgcctgcaggcatcttggggtctgggtttgccctgaaggttcaggagcagcacaggcagaagcactttgagaagaggcggaacccggcagcaggcctgatccagtcggcctggagattctacgccaccaacctctcgcgcacagacctgcactccacgtggcagtactacgagcgaacggtcaccgtgcccatgtacagacttatccccccgctgaaccagctggagctgctgaggaacctcaagagtaaatctggactcgctttcaggaaggaccccccgccggagccgtctccaagccagaaggtcagtttgaaagatcgtgtcttctccagcccccgaggcgtggctgccaaggggaaggggtccccgcaggcccagactgtgaggcggtcacccagcgccgaccagagcctcgaggacagccccagcaaggtgcccaagagctggagcttcggggaccgcagccgggcacgccaggctttccgcatcaagggtgccgcgtcacggcagaactcagaagaagcaagcctccccggagaggacattgtggatgacaagagctgcccctgcgagtttgtgaccgaggacctgaccccgggcctcaaagtcagcatcagagccgtgtgtgtcatgcggttcctggtgtccaagcggaagttcaaggagagcctgcggccctacgacgtgatggacgtcatcgagcagtactcagccggccacctggacatgctgtcccgaattaagagcctgcagtccagagtggaccagatcgtggggcggggcccagcgatcacggacaaggaccgcaccaagggcccggccgaggcggagctgcccgaggaccccagcatgatgggacggctcgggaaggtggagaagcaggtcttgtccatggagaagaagctggacttcctggtgaatatctacatgcagcggatgggcatccccccgacagagaccgaggcctactttggggccaaagagccggagccggcgccgccgtaccacagcccggaagacagccgggagcatgtcgacaggcacggctgcattgtcaagatcgtgcgctccagcagctccacgggccagaagaacttctcggcgcccccggccgcgccccctgtccagtgtccgccctccacctcctggcagccacagagccacccgcgccagggccacggcacctcccccgtgggggaccacggctccctggtgcgcatcccgccgccgcctgcccacgagcggtcgctgtccgcctacggcgggggcaaccgcgccagcatggagttcctgcggcaggaggacaccccgggctgcaggccccccgaggggaccctgcgggacagcgacacgtccatctccatcccgtccgtggaccacgaggagctggagcgttccttcagcggcttcagcatctcccagtccaaggagaacctggatgctctcaacagctgctacgcggccgtggcgccttgtgccaaagtcaggccctacattgcggagggagagtcagacaccgactccgacctctgtaccccgtgcgggcccccgccacgctcggccaccggcgagggtccctttggtgacgtgggctgggccgggcccaggaagtgaggcggcgctgggccagtggacccgcccgcggccctcctcagcacggtgcctccgaggttttgaggcgggaaccctctggggcccttttcttacagtaactgagtgtggcgggaagggtgggccctggaggggcccatgtgggctgaaggatgggggctcctggcagtgaccttttacaaaagttattttccaacagggcactcccaggccctgtcgccattgaggtgcctccgctgggctgtctcctcacccctccctgtgctggagcctgtcccaaaaaggtgccaactgggaggcctcggaagccactgtccaggctcccactgcctgtctgctctgttcccaaaggcagcgtgtgtggcctcgggccctgcggtggcatgaagcatcccttctggtgtgggcatcgctacgtgttttgggggcagcgtttcacggcggtgcccttgctgtctcccttgggctggctcgagcctggggtccatgtccctttgccgtcccgtcatggggcagggaatccatagcggggcccacaggcaggggtatgagtgcgtcccacccaacgcagcaccagccccggccaccgctccccgtgtccccagttccgtctcagctacctggactccaggaccctggagaagggagacctggcagtggagggaggctgtgctgtgtgtccccctgcaggtgtgaccccgcctgctctttcctcccccgccaggtgtggccccgcctgctctttcctcccccaccagtatggccccacctgctctttcctncccccccaaggtgtggccccacctgttctttcctcccctgccgaggtgtgaccccacctgctctttcctccctcccagtatggccccacctgctctttcctcccccgaggtgaggccccgcctgctctttcctcccatgggagccgctgaggcgtgcgcacctgggcacaggttggggctctgcaggatgaggaagacaggccaatcccttccctcccagaagctggccgcccagcaggagggactgaggccagactcatgtccagcaaggaacgtgtggtgtgtcccctgggaagtctctgggccctgggaagagggaaggtgcacgtcctgggatggttgcggggccctgttttgggagacaaaggggtagagggtctgtcttgngcccccccagactctagcccgagcagtgcagccacctactgccccacctcagagaagtgcagcgggaaggaggctggaggtggtgcggcgctgcctcgggtgtctgcgtgaatgagcgtggccaaggaccagtgccacctcatggcaaagagctcccgcagtgtttgttagagtgcacatcctacgtgcccactggcacacacacgtgctcacatacangtcngngtacaggngtacacatgcangcttgcacacatgcacacagaccacatagcacacatgtgcactgaccacacctgtatagaccatgcacagtacacatacgtgcatacacatgcctgcatacaggcatacacatgcacgcttacatgtacacgtgcacagatcacacacatgcacacacgtgtagctcacacacagtatacacatacacaagtgcacagaccacacacagcactaacacatgcacacacaaagtgcataggccacacagcacatgcacacaggtgcacagaccacacagcacacacaagtgcacagagcacactgcacacatgcacacacacacgcgtgcatgcacactcctcgcacttccagccttggagcccttctgtctctggtctttctctttgaccctgctgagtgtaagctgcctggggaggggctacaaggagtaattgtggctttaggggtcgtggtgatgctggaatgtcaagcgccgtcgtggggtatccgactgtccgggctcctggtccgcagtggcagagcgccaggcagagccaatcagggtctcgtgctgcccttcccccccacagcctggcagccatccagaggaggggctctaccagatgccaaggtgccccggtgtctgtatgggtgtccggttgggtcctgtgtttggtctgccctggaggtggctgggccctcctgggatgggtggctcagcctcgaatcccaggccccagcccaggcaggtgctgctgcctgttgtggtttcctggcccagcttctccttctccctctgcataaaatcacagtccgtgagtcttccagctgccaccacggctgggacacgctgggggagggctcctcccatgcctcctgcacacagccgtctgagcagggcaggtgccaacaccccccaccggagacacgctgcccctcagcgatgcccctaccttttggggggcctcgtctcaagcccccccttggaggctgaaatcaccccaggcactgtgagggcttctccagggggacaccctttgagctgtgggtctgatcaccccaagtcccgcacacggaggagaggcacagccagggcgtgtggtttaatgtttgccccttcggggctggaggtctcagtgtttctagattccagaccctgctgccagagagacctgctgccggagagaaggggaggaggactccagctgggctcggtcccccacagtcagggacccccataaaggacacccccttctctctagaaagagctgggctctcagctatttctagttgcttcccagaagccgaggagcagaaggagctgtgagagctttgcagaaacgcccttgtccccgccctcctgagctatgaatgccgtacagagcagaggctggggcattggcaagatcacaggttgatgctgcacagccccattgacacaaaccctcaaagcagacgtgagagggacggttcacaaagcttggacctgccgtggagggtgcccggcagacgtggcgtgagagggacggctcacgaggcttggacctgctgtggagggtgcccagcagacgtggtgtgagaggaacggctcacgagacttggacctggtggagggtgcccagcagacgtggtgtgagagggacggctcacagggcttggaccggagagagatggctcatgagacttggacctgccgtggagggtgcccagcagacgtggtatgagagggatggctcacgaggcttggacctggtggagggtgcccggcagacgtgtgagagggacggttcacaaggcttggacctgccatggagggtgcccagcagacgtggtgtgagagggacagctcacgaggcttggacctgccgtggagggtgcccagcagggggctgagctctgaggggtgggtgctcagtgcacgggtgcccccagtgtcctctgatcctgtccggtgcctcccccaacccccacacccatgcagaactcccaggtcacatgcacgtatgtccagggcatgggggtggcgtgaagaggcctggtcagggcctttaggggctgcaggacggaatggccacctggggagcctgtgtggctgtgccgggcagccatcctgcattcccacccagcgcgcagtctccacctcggccccagcaaagcgctaagcagccggagagacagccagggcggcttcctgaaggatgtgggatggtggactccggggtcgagggaatacgcaggttcctgtcctccgggagacctagagaagctgcacacccaggagctttccatgacccgggagcatgagtgaatggggggttccagtttgctgaactttgctgtcttgtaagggtgggggctgacggccgaccctgggaggaggtgacaccgcagggggaggttgtgggcaacggtggaggaggagagacgggaggggaccatttgggatggaggggcctcttcagagttttaaaaggcgtttgtggggtggagttgagtgtgctctgggcttggacacttgccgtggtgcccctggctggccgaggagactggctctggccagggccccgtcctgagaggtcctcagcgtctgactctcggccaggcgccagcaaggaggggccggtccccggggctaccaggcaggcacgtgcacatcgccatcgccacacgccaactccgcctgggttttacaaagtcgttgccttaatgcatgtggacaggaactccctgaggtcgccccatgccccctggctgtgccaggtacggacgccctggaccctgcgaacaggtggggcgggcgaggggcccaagggacgggctccagagacacgcgcagggcaggaggggtctcacggaggggtctcgcactgaggcgcccagagctggtggtcccgctggacgccatccctctgcccgggatccacacggcccacgtgtgcccgccatgcccgcgccccacgccattgcagtcttccatcctctggccgtgacggtggctgcagcttccccatttgcgccgttgcctctggctgtctgcacttttgttcatgctccaaagaacatttcataatgccttcagtaccgacgtacacttctgaccattttgtatgtgtccttgtgccgtagtgaccaggcctttttttggtggatgtgttaccccgcacacttcaatctcaactttgtgcaccgtccattttctagggatagacgcccagggaatgaactctagttttctaacagattagctgagatattaacttactcacacggacaggttgatgccagagccgtaagaatgcgccagtgcgggtttgcgggggacttcgggtgtggggtcctgcggccgcgatggccgtggaaggttctggggatccctgctgccacggggacgagttcggacgccaggtggacctgtgcactcagtaaaacgcagtgattcaaaaaaaaaaaaa

SEQ ID NO: 303 - DNA, 2947 bp, Homo sapiens
ctcccgccacctccgccaccatgctgctcccccagctctgctggctgccgctgctcgctgggctgctcccgccggtgcccgctcagaagttctcggcgctcacgtttttgagagtggatcaagataaagacaaggattgtagcttggactgtgcgggttcgccccagaaacctctctgcgcatctgacggaaggaccttcctttcccgttgtgaatttcaacgtgccaagtgcaaagatccccagctagagattgcatatcgaggaaactgcaaagacgtgtccaggtgtgtggccgaaaggaagtatacccaggagcaagcccggaaggagtttcagcaagtgttcattcctgagtgcaatgacgacggcacctacagtcaggtccagtgtcacagctacacgggatactgctggtgcgtcacgcccaacgggaggcccatcagcggcactgccgtggcccacaagacgccccggtgcccgggttccgtaaatgaaaagttaccccaacgcgaaggcacaggaaaaacagtctccttgcaaatcttttccgttctgaattcagatgatgccgcagctccagcgttggagactcagcctcaaggagatgaagaagatattgcatcacgttaccctaccctttggactgaacaggttaaaagtcggcagaacaaaaccaataagaattcagtgtcatcctgtgaccaagagcaccagtctgccctggaggaagccaagcagcccaagaacgacaatgtggtgatccctgagtgtgcgcacggcggcctctacaagccagtgcagtgccacccctccacggggtactgctggtgcgtcctggtggacacggggcgccccattcccggcacatccacaaggtacgagcagccgaaatgtgacaacacggccagggcccacccagccaaagcccgggacctgtacaagggccgccagctacaaggttgtccgggtgccaaaaagcatgagtttctgaccagcgttctggacgcgctgtccacggacatggtccacgccgcctccgacccctcctcctcgtcaggcaggctctcagaacccgaccccagccataccctagaggagcgggtggtgcactggtacttcaaactactggataaaaactccagcggagacatcggcaaaaaggaaatcaaacccttcaagaggttccttcgcaaaaaatcaaagcccaaaaaatgtgtgaagaagtttgttgaatactgtgacgtgaataatgacaaatccatctccgtacaagaactgatgggctgcctgggcgtggcgaaagaggacggcaaagcggacaccaagaaacgccacacccccagaggtcatgctgaaagtacgtctaatagacagccaaggaaacaaggataaatggctcataccccgaaggcagttcctagacacatgggaaatttccctcaccaaagagcaattaagaaaacaaaaacagaaacacatagtatttgcactttgtactttaaatgtaaattcactttgtagaaatgagctatttaaacagactgttttaatctgtgaaaatggagagctggcttcagaaaattaatcacatacaatgtatgtgtcctcttttgaccttggaaatctgtatgtggtggagaagtatttgaatgcatttaggcttaatttcttcgccttccacatgttaacagtagagctctatgcactccggctgcaatcgtatggctttctctaacccctgcagtcacttccagatgcctgtgcttacagcattgtggaatcatgttggaagctccacatgtccatggaagtttgtgatgtacggccgaccctacaggcagttaacatgcatgggctggtttgtttcttgggattttcttttagtttgtcttgttttgctttccagagatcttgctcatacaatgaatcacgcaaccactaaagctatccagttaagtgcaggtagttcccctggaggaaataatattttcaaactgtcgttggtgtgatactttggctcaaaggatctttgcttttccattttaagcttctgttttgagttttgccctggggcttgaatgagtcccagagagtcgttccgatggtgggaggctgcctaggaggcagtaaatccagtcacagtgcctgggaggggcccatccttccaaaatgtaaatccagtcgcggtgtgaccgagctggctaacaggcttgtctgcctggttttcctcctacacatggacattattctcctgatcctcctacctggtccaccccagggctaccggaaggtaaaatcttcacctgaaccaattatgagcagtctccttactgaaggtacagccggatacgtggtgcccccggggctggtgttggcagccggggggaggtgcctgagggtccccacggttcctttctgcttttctgaatgcatcaagggtacgagaacttgccaatgggaaattcatccgagtggcactggcagagaaggataggagtggaatgcccacacagtgaccaacagaactggtctgcgtgcataaccagctgccaccctcaggcctgggccccagagctcagggcacccagtgtcttaaggaaccatttggaggacagtctgagagcaggaacttcaagctgtgattctatctcggctcagacttttggttggaaaaagatcttcatggccccaaatcccctgagacatgccttgtagaatgattttgtgatgttgtgatgcttgtggagcatcgcgtaaggcttcttgcttatttaaactgtgcaaggtaaaaatcaagcctttggagccacagaaccagctcaagtacatgccaatgttgtttaagaaacagttatgatcctaaactttttggataatcttttatatttctgacctttgaatttaatcattgttcttagattaaaataaaatatgctattgaaact

SEQ ID NO: 304 - DNA, 596 bp, Homo sapiens
tggctgggatcatccgcggcggccgggctcgtggggcgcctggagtgagggttctggttcccgccggcgaggattgttaaaatgagtcttcggaagcaaacccctagtgacttcttaaagcaaatcatcggacgaccagttgtggtaaaattaaattctggagtggattatcgaggggtcctggcttgcctggatggctacatgaatatagccctggagcagacagaagaatatgtaaatggacaactgaagaataagtatggggatgcatttatccgaggaaacaatgtgttgtacatcagtacacagaagagacggatgtgaagacaccaagagagcaacgcttttcatagttggatatatttttttatgaattttttctaatttttgcttcttttgtgatacaatttgtcctctttttataatagttggtgatttttcactgacatgtgagtaagataaatgtatacaattgtggatttaattgtgaaatgttctttcacttgtaagtttcagtcattttcttttacctcgttgtcagtgtacagaatgctaaaataattaaaaaaagacaaaataaaaaaaaaaaaaaaaaa

SEQ ID NO: 305 - DNA, 512 bp, Homo sapiens
tgtgtgccatgtgctcggtgagaggacacagtcaaccagagcagggttgatccaggctgtttctctgcaaaccgagtcaaaactcgacatcatttccagctcatgtattttgtacgtgcatcatatatcagatctaataagatctggaagatggatatgcaaataagaggcctttgtcttctagaatgattagagtagaggagaattggatagtacagaatatgctctagtttcagtcagacatattcataaagggaaatgttaagttctggcagctgacttagtgttggatgtctcctaagtctcaggatagaagcccatcattagagcataggcacttcaggaattcttgtgtgaaattctagtgagtgaggaggtgtgacatgcagctatctttgggctccttttgtgtgtgttctgctggacacaacacatgggagtgttcagtgttgtccgtggtcaatatctatgttcagtcctgatgggaggggcctagggactgctttggagat

SEQ ID NO: 306 - DNA, 645 bp, Homo sapiens
atgcggaccctcctgctggtgctgtggctggcgacgcgcggaagcgcgctctactttcacatcggagagacggagaagaagtgctttattgaggagatcccggacgagaccatggtcataggaaactaccggacgcagctgtatgacaagcagcgggaggagtaccagccggccaccccggggcttggcatgtttgtggaggtgaaggacccagaggacaaggtcatcctggcccggcagtatggctccgagggcaggttcactttcacttcccatacccctggtgagcaccagatctgtcttcactccaattccaccaagttctccctctttgctggaggcatgctgagagttcacctggacatccaggtaggtgaacatgccaatgactatgcagaaattgctgctaaagacaagttgagtgagttgcagctacgagtgcgacagctggtggaacaagtggagcagatccagaaagagcagaactaccagcggtggcgagaggagcgcttccggcagaccagtgagagcaccaaccagcgggtgctgtggtggtccattctgcagaccctcatcctcgtggccatcggtgtctggcagatgcggcacctcaagagcttctttgaagccaagaagcttgtgtag

SEQ ID NO: 307 - DNA, 5976 bp, Homo sapiens
ttggggcagaggaggcttgtaggaataggggaagagttcataagcagagctgaaacaacaccaaacatggaaatgttacaaggtggagaaattgtgcttactgaaactcttctcagaaatattgctgtttgtggatgatagaaatcttcagagttgtcacttaaggtagaggtaggagggtaagaagcgtcaaggactcaccgaattgtccattcccccttttgttctgctgtggaatgttttgtgctgctgtgttggaaaactttggacagacaattgtccccgatttgggatcactggaaagtcagcatgattttcgaaccccggagtttgaagaatttaatggaaaacctgactccctcttttttaatgatggccagcgaagaattgactttgttctagtatatgaggatgaaagcagaaaagagaccaataaaaagggtacaaatgaaaaacaaaggaggaaaagacaagcatacgaatctaaccttatctgtcatggcctgcagttagaagcaacaagatcagtattggatgacaagcttgtatttgtaaaagtacacgcaccatgggaggtgttatgtacgtatgctgagataatgcacatcaaattgcctctgaaacccaatgatctgaaaaaccggtcctcagcctttggtacactcaactggtttaccaaagtcctcagtgtagacgaaagcatcatcaagccagagcaagagtttttcactgccccatttgagaagaaccggatgaatgatttttacatagttgatagagatgctttcttcaatccagccaccagaagccgcattgtttacttcatcctctctcgggtcaagtaccaagtgataaacaatgttagcaagtttgggatcaacagacttgtaaactctgggatctacaaggcagctttcccactccatgattgcaaattccgccgtcagtcagaggatcccagctgccctaatgaacggtaccttctgtacagagaatgggctcatcctcgaagcatatacaaaaagcagcccttggatcttatcaggaaatactatggagagaagattggaatctactttgcttggctgggctattacactcagatgcttctcctggccgcagttgtaggagtggcttgctttctctatggatatcttaatcaagataactgtacatggagcaaagaagtttgtcatcctgatattggtggcaagatcataatgtgtcctcagtgtgataggctttgtccattctggaaactcaatattacttgcgagtcctcaaagaaattgtgcatcttcgacagttttggaaccctggtctttgcagtatttatgggagtatgggttaccttgtttttggagttttggaagcgacgccaggcagaacttgagtatgaatgggatactgttgagttacagcaggaagaacaagcccgaccagaatacgaagcacgatgtactcacgtagtgataaatgagattactcaggaagaagaacgcattccctttactgcctggggaaaatgtatacggataaccctctgtgccagtgctgtctttttctggatcctattgatcatcgcttcagttattgggatcattgtctataggctctcggtgttcattgtattttctgcaaaacttcccaagaacattaatggaacagacccaatccagaaatacctgactccacagacagccacgtccatcacggcctccatcatcagctttataattatcatgattctgaacaccatatatgaaaaagtggcaattatgattactaacttcgaactcccaaggacccagactgattatgagaacagcctcaccatgaagatgttcttatctcagtttgtcaactactactcttcatgcttctacatagcattctttaagggcaaatttgtaggctatccaggagacccagtttattggttgggaaaatacagaaatgaagagtgtgacccaggtggctgtcttcttgaactgacaactcagctgacaataatcatgggaggaaaagcaatctggaatcacatacaagaagtattattgccctggatcatgaatctaattgggcgatttcacagagtttctggatcagaaaagataaccccacgatgggaacaggactaccatctgcagcctatgggcaaactgggattattttatgaatatcttgaaatgattattcagtttgggttcgtcaccctatttgtggcctcttttccactggcccctctgttggctctcgtgaacaatatattggaaataagagtggacgcatggaaactgaccacccagtttagacgcctggtaccagagaaagcccaagacattggagcatggcagcccatcatgcaaggaatagcaattctggctgtggtgaccaatgccatgatcatagctttcacgtcggacatgatcccccgcctagtgtactactggtccttctccgtccctccctacggggaccacacttcctacaccatggaagggtacatcaacaacactctctccatcttcaaagtcgcagacttcaaaaacaaaagcaagggaaacccgtactctgacctgggtaaccataccacatgcaggtatcgtgatttccgatacccacctggacacccccaggagtataaacacaacatctactattggcatgtgattgcagccaagctggcttttatcattgtcatggagcacgtcatctactctgtgaaatttttcatttcatatgcaattcccgatgtatcaaaacgcacaaagagcaagatccagagagaaaaatacctaacccaaaagcttcttcatgagaatcacctcaaagatatgacgaaaaatatgggggtgatagctgagcggatgatagaagcagtagataacaatttacggccaaaatcagaataagagctttatgttctgagaagcactttaaggaatttagctttgtcaaaatatattaggaatcactaatgagaatgtgtaagttaaatcactttggcaaatatgagtctcaactattgccatttcctcatgtattatttttcagtttcagctagcgatgcagaaactggaaaatgtaaaacttagatcatgaagggcataaaacttatcacccggaaaacctcaatgttacctttttctgataaattggaattttacagaaaaagtccctcagtgtgcttaaaaaccaccccttctaaagtagaatggattcttttttttccgtttgattattttcatttctgtctattctcaggcgcatgatctcctttatttttaagccatgtttcatttcttcacttggctagatctgttccagggtcatcttttccttacagtaccatcattatagatttaatttaatagctttcatgtgattaaaaatagctaactagactcaaggattcacaatatttaggtgtattttcaatacctccagaaaggaaacctcagttaatcagaggaaatagtttcagtcttcatttgagcatgtctttccatctcaaaaaaatactcttagtaggttggagtgaagatagcaaggttttgaagcatatttgtcctaatccacagtgacactttttatcttccaggagcactcctaggaggttccgtgcctaatcaatgttgactgctttgcagatctcaagggaataaaatgacaaaagcagggaaagttacagattcaaacagcattttaactcatgttgatctggataattaatcttttctaaagatgtgtagtttcttggaaaacagtgatatcacatgattaaaattacatttttatcaacataattgtctggaaaagataagcccctcaattttctaccagttgacttttattcattagatacagaaggtgcagtattacacatcaccagctgcctttgtgaatggctcactacacagccattggggtacaactgtgtgcatgggcagaaacagcaagtgccctcattgtggtcattgggtggggagtgccttttgtcaaggagtctgcaggaattggcttatttctgtatgccaaagtgatcaacacaccaaagtctctgccataaagaatgtggcttccttgcatcctccatcctgttactctgggcccagtaatttgatgtaactgtctgattgtactagagacaggagtatacccagcttattcataatcaagtaaagagactcagattagatttgattttttagcctcctctagagccaatcaggcagttaagagtaataaaggaaaagggtttggtcacaaaccctaccattatctggagattacttcctgctgcactcctgtcttgccatgcacgtcttgccccctcacttttgctcagcctagcagtctacttcactttattgccttgtaagtgtcaggcctcctgggcgctctggaaaagacagggagccaggccctctcacccctactggtaacaggtcattgctgggtgcacaagagggaggtgatttgcatcatggtcatgctgcatgggcttcactgggatgctgttaaacaccagaggagccaacctatcagaatcccagcagcaaaggaaaactcagattttagaggctttttacaataaagtagcgtaactctaggtcatgattgatttcaaatgcctgccatgaatgatttgtaagtaattatgtaggatccatcaaagcagtattgtaggcttttgaattgtcccagtggatccgggaccccatttcactgtctctcttgatcgtgttaatgatgcaatcagagttcaagacaggccccatgaagtctgactgcactgggatggagaaatgaatttcttcccactgaaggaaactctttctcattcgcagccaagacgggagtgccactgttcctctcttcactcctgagatactgcttctggaagcgggtgtcacttcctctctagtacctcttctcttctctgaagtgtgtgactatctcctagtgtttaaatttggcagttactcgccatgtatgtcagcatagaaaaggaaatgtttttaccttatctcctgtatgtatgatagaacttaaaagaaatgtgcatttgttttcatagccccagcagagaaaatcctcttcatagattaaatgtgctgctgtggacaggagggaaaaaaaaaccctctacatattgaaaggcaccaaatgtaatatctgacactgttaagatgcccaaaagagcaaagttgtagtggagatgcagggtcatttccccatgccatccacagtgtttgttagtgagtccacggctgacttgcagtgataaagaaaagcatggagctgtgtctgcagacaatggtggctgcatctgtaagtggcttcagaggcagcagccctggggaaattgatgggtgtggcagtggacctgtgaagagggagaatctagccttcagcctgtccagtgttaaccactagagaaactgagctttatatccttttttaatgcctgtgaattttagcatattgaaacattagagcaaatactcaggggatttttcattaaacatccctcagataatttagctatatatcattagaaagggaaagctatcatttttattttaaaactaaacaaggccatcttataaactgtcaccaaagtcttcccttttttattgcatgtgtgccttgaatttcataaaacattaattcacaatgggggtcagaatgtactcttgttgaaacacttcttgtaccattttatgttcatattatgtttgagagggtaaaaatgtatgagcagcttaactgaagtagaactattcatgatgcttttcacacattgtggcataagatgtaaagtttgtaattaatgttaatctctgtgcattttaatattcttttataattattaatgttaatttctgtgcattttaatattcttttataattatgagcattttaataaattcatttttacaaacaaaaaagaaaaaaaaaaaaaaaaaa

SEQ ID NO: 308 - DNA, 453 bp, Homo sapiens
tagaaattgaggagcaccacaccttggttgtggttcagcctgggaaagagacctccttccttctgtttataaattaaaatcaggaggggcgccatcagaaagcatggacaatatacatactataaatttttagaaatatcaccatcgtgtcacgtcaacgatgccaaattatgttagtgtgagcagaaacccggtgtgggaggaaggcggcacagccgaaggaaatagctcagataatctagtcactttcgatactgtacttcagatgcgaaatggatattcgactggaaacctgacaaagcgcgcctgctttgatgtgaactgttatagacaatgaccagtggccgggtcagtgggatgtctctctgcgagcacaaaggcttatcaaatgacactaaaaataagttcaacaaccatcactttggaagggagaaggcgaacatttcatgtttg

SEQ ID NO: 309 - DNA, 1725 bp, Homo sapiens
cgcctcttcacggcactgggatccgcatctgcctgggatcatcaagccctagaagctgggtttctttaaattagggctgccgttttctgtttctccctgggctgcggaaagccagaagattttatctagcttatacaaggctgctggtgttccctctttttttccacgagggtgtttttggctgcaattgcatgaaatcccaatggtgtagaccagtggcgatggatctaggagtttaccaactgagacatttttcaatttctttcttgtcatccttgctggggactgaaaacgcttctgtgagacttgataatagctcctctggtgcaagtgtggtagctattgacaacaaaatcgagcaagctatggatctagtgaaaagccatttgatgtatgcggtcagagaagaagtggaggtcctcaaagagcaaatcaaagaactaatagagaaaaattcccagctggagcaggagaacaatctgctgaagacactggccagtcctgagcagcttgcccagtttcaggcccagctgcagactggctccccccctgccaccacccagccacagggcaccacacagccccccgcccagccagcatcgcagggctcaggaccaaccgcatagctgcctatgcccccgcagaactggctgctgcgtgtgaactgaacagacggagaagatgtgctagggagaatctgcctccacagtcacccatttcattgctcgctgcgaaagagacgtgagactgacatatgccattatctcttttccagtattaaacactcatatgcttatggcttggagaaatttcttagttgggtgaattaaaggttaatccgagaattagcatggatataccgggacctcatgcagcttggcagatatctgagaaatggtttaattcatgctcaggagctgtgtgcctttccatcccttccggctccctacccctcacttccaagggttctctctcctgcttgcgcttagtgtcctacatggggttgtgaagcgatggagctcctcactggactcgcctctctcctctcctccccccaggaggaacttgaaaggagggtaaaaagactaaaatgagggggaacagagttcactgtacaaatttgacaactgtcaccaaaattcataaaaaacaatagtactgtgcctctttcttctcaaacaatggatgacacaaaactatgagagtgacaaaatggtgacaggtagctgggacctaggctatcttaccatgaaggttgttttgcttattgtatatttgtgtatgtagtgtaactattttgtacaatagaggactgtaactactatttaggttgtacagattgaaatttagttgtttcattggctgtctgaggaggtgtggacttttatatatagatctacataaaaactgctacatgacaaaaaccacacctaaaccccttttaagaatttggcacagttactcactttgtgtaatctgaaatctagctgctgaatacgctgaagtaaatccttgttcactgaagtctttcaattgagctggttgaatactttgaaaaatgctcagttctaactaatgaaatggatttcccagtaggggtttctgcatatcacctgtatagtagttatatgcatatgtttctgtgcatgttctctacacaattgtaaggtgtcactgtatttaactgttgcacttgtcaactttcaataaagcatataaatgttg

SEQ ID NO: 310 - DNA, 3149 bp, Homo sapiens
agggggcgcggtgggaggagtaggagaagacaaaagccgaaagcgaagagggcccgggctgcacacaccggctgggaggcagccgtctgtgcagcgagcagccggcgcggggaggccgcagtgcacggggcgtcacagtcggcaggcagcatggggaagggagggaaccagggcgagggggccgccgagcgcgaggtgtcggtgcccaccttcagctgggaggagattcagaagcataacctgcgcaccgacaggtggctggtcattgaccgcaaggtttacaacatcaccaaatggtccatccagcacccggggggccagcgggtcatcgggcactacgctggagaagatgcaacggatgccttccgcgccttccaccctgacctggaattcgtgggcaagttcttgaaacccctgctgattggtgaactggccccggaggagcccagccaggaccacggcaagaactcaaagatcactgaggacttccgggccctgaggaagacggctgaggacatgaacctgttcaagaccaaccacgtgttcttcctcctcctcctggcccacatcatcgccctggagagcattgcatggttcactgtcttttactttggcaatggctggattcctaccctcatcacggcctttgtccttgctacctctcaggcccaagctggatggctgcaacatgattatggccacctgtctgtctacagaaaacccaagtggaaccaccttgtccacaaattcgtcattggccacttaaagggtgcctctgccaactggtggaatcatcgccacttccagcaccacgccaagcctaacatcttccacaaggatcccgatgtgaacatgctgcacgtgtttgttctgggcgaatggcagcccatcgagtacggcaagaagaagctgaaatacctgccctacaatcaccagcacgaatacttcttcctgattgggccgccgctgctcatccccatgtatttccagtaccagatcatcatgaccatgatcgtccataagaactgggtggacctggcctgggccgtcagctactacatccggttcttcatcacctacatccctttctacggcatcctgggagccctccttttcctcaacttcatcaggttcctggagagccactggtttgtgtgggtcacacagatgaatcacatcgtcatggagattgaccaggaggcctaccgtgactggttcagtagccagctgacagccacctgcaacgtggagcagtccttcttcaacgactggttcagtggacaccttaacttccagattgagcaccacctcttccccaccatgccccggcacaacttacacaagatcgccccgctggtgaagtctctatgtgccaagcatggcattgaataccaggagaagccgctactgagggccctgctggacatcatcaggtccctgaagaagtctgggaagctgtggctggacgcctaccttcacaaatgaagccacagcccccgggacaccgtggggaaggggtgcaggtggggtgatggccagaggaatgatgggcttttgttctgaggggtgtccgagaggctggtgtatgcactgctcacggaccccatgttggatctttctccctttctcctctcctttttctcttcacatctcccccatagcaccctgccctcatgggacctgccctccctcagccgtcagccatcagccatggccctcccagtgcctcctagccccttcttccaaggagcagagaggtggccaccgggggtggctctgtcctacctccactctctgcccctaaagatgggaggagaccagcggtccatgggtctggcctgtgagtctccccttgcagcctggtcactaggcatcacccccgctttggttcttcagatgctcttggggttcataggggcaggtcctagtcgggcagggcccctgaccctcccggcctggcttcactctccctgacggctgccattggtccaccctttcatagagaggcctgctttgttacaaagctcgggtctccctcctgcagctcggttaagtacccgaggcctctcttaagatgtccagggccccaggcccgcgggcacagccagcccaaaccttgggccctggaagagtcctccaccccatcactagagtgctctgaccctgggctttcacgggccccattccaccgcctccccaacttgagcctgtgaccttgggaccaaagggggagtccctcgtctcttgtgactcagcagaggcagtggccacgttcagggaggggccggctggcctggaggctcagcccaccctccagcttttcctcagggtgtcctgaggtccaagattctggagcaatctgacccttctccaaaggctctgttatcagctgggcagtgccagccaatccctggccatttggccccaggggacgtgggccctgcaggctgcaggagggcactggagctgggaggtctcgtcccagccctccccatctcggggctgctgtgtggacggcgctgcctcaggcactctcctgtctgaacctgcccttactgtgtttaacctgttgctccaggatgcattctgataggagggggcggcagggctgggccttgtgacaatctgcctttcaccacatggccttgcctcggtggccctgactgtcagggagggccagggaggcagagcgggagggagtctcaggaggaggctgccctgaggggctggggagggggtacctcatgaggaccagggtggagctgagaagaggaggaggtgggggctggaggtgctggtagctgaggggacgggcaagtgagaggggagggagggaagtcctgggaggatcctgagctgctgttgcagtctaacccactaatcagttcttagattcaggggaagggcaggcaccaacaactcagaatgggggctttcggggagggcgcctagtccccccagctctaagcagccaggagggacctgcatctaagcatctgggttgccatggcaatggcatgccccccagctactgtatgcccccgacccccgcagaggcagaatgaacccatagggagctgatcgtaatgtttatcatgttacttccccacccctacattttttgaaataaaataaggaattttattctc

SEQ ID NO: 311 - DNA, 1501 bp, Homo sapiens; identical to SEQ ID NO: 105

SEQ ID NO: 312 - DNA, 3541 bp, Homo sapiens
tccagtttgcttcttggagaacactggacagctgaataaatgcagtatctaaatataaaagaggactgcaatgccatggctttctgtgctaaaatgaggagctccaagaagactgaggtgaacctggaggcccctgagccaggggtggaagtgatcttctatctgtcggacagggagcccctccggctgggcagtggagagtacacagcagaggaactgtgcatcagggctgcacaggcatgccgtatctctcctctttgtcacaacctctttgccctgtatgacgagaacaccaagctctggtatgctccaaatcgcaccatcaccgttgatgacaagatgtccctccggctccactaccggatgaggttctatttcaccaattggcatggaaccaacgacaatgagcagtcagtgtggcgtcattctccaaagaagcagaaaaatggctacgagaaaaaaaagattccagatgcaacccctctccttgatgccagctcactggagtatctgtttgctcagggacagtatgatttggtgaaatgcctggctcctattcgagaccccaagaccgagcaggatggacatgatattgagaacgagtgtctagggatggctgtcctggccatctcacactatgccatgatgaagaagatgcagttgccagaactgcccaaggacatcagctacaagcgatatattccagaaacattgaataagtccatcagacagaggaaccttctcaccaggatgcggataaataatgttttcaaggatttcctaaaggaatttaacaacaagaccatttgtgacagcagcgtgtccacgcatgacctgaaggtgaaatacttggctaccttggaaactttgacaaaacattacggtgctgaaatatttgagacttccatgttactgatttcatcagaaaatgagatgaattggtttcattcgaatgacggtggaaacgttctctactacgaagtgatggtgactgggaatcttggaatccagtggaggcataaaccaaatgttgtttctgttgaaaaggaaaaaaataaactgaagcggaaaaaactggaaaataaagacaagaaggatgaggagaaaaacaagatccgggaagagtggaacaatttttcattcttccctgaaatcactcacattgtaataaaggagtctgtggtcagcattaacaagcaggacaacaagaaaatggaactgaagctctcttcccacgaggaggccttgtcctttgtgtccctggtagatggctacttccggctcacagcagatgcccatcattacctctgcaccgacgtggcccccccgttgatcgtccacaacatacagaatggctgtcatggtccaatctgtacagaatacgccatcaataaattgcggcaagaaggaagcgaggaggggatgtacgtgctgaggtggagctgcaccgactttgacaacatcctcatgaccgtcacctgctttgagaagtctgagcaggtgcagggtgcccagaagcagttcaagaactttcagatcgaggtgcagaagggccgctacagtctgcacggttcggaccgcagcttccccagcttgggagacctcatgagccacctcaagaagcagatcctgcgcacggataacatcagcttcatgctaaaacgctgctgccagcccaagccccgagaaatctccaacctgctggtggctactaagaaagcccaggagtggcagcccgtctaccccatgagccagctgagtttcgatcggatcctcaagaaggatctggtgcagggcgagcaccttgggagaggcacgagaacacacatctattctgggaccctgatggattacaaggatgacgaaggaacttctgaagagaagaagataaaagtgatcctcaaagtcttagaccccagccacagggatatttccctggccttcttcgaggcagccagcatgatgagacaggtctcccacaaacacatcgtgtacctctatggcgtctgtgtccgcgacgtggagaatatcatggtggaagagtttgtggaagggggtcctctggatctcttcatgcaccggaaaagtgatgtccttaccacaccatggaaattcaaagttgccaaacagctggccagtgccctgagctacttggaggataaagacctggtccatggaaatgtgtgtactaaaaacctcctcctggcccgtgagggaatcgacagtgagtgtggcccattcatcaagctcagtgaccccggcatccccattacggtgctgtctaggcaagaatgcattgaacgaatcccatggattgctcctgagtgtgttgaggactccaagaacctgagtgtggctgctgacaagtggagctttggaaccacgctctgggaaatctgctacaatggcgagatccccttgaaagacaagacgctgattgagaaagagagattctatgaaagccggtgcaggccagtgacaccatcatgtaaggagctggctgacctcatgacccgctgcatgaactatgaccccaatcagaggcctttcttccgagccatcatgagagacattaataagcttgaagagcagaatccagatattgtttccagaaaaaaaaaccagccaactgaagtggaccccacacattttgagaagcgcttcctaaagaggatccgtgacttgggagagggccactttgggaaggttgagctctgcaggtatgaccccgaagacaatacaggggagcaggtggctgttaaatctctgaagcctgagagtggaggtaaccacatagctgatctgaaaaaggaaatcgagatcttaaggaacctctatcatgagaacattgtgaagtacaaaggaatctgcacagaagacggaggaaatggtattaagctcatcatggaatttctgccttcgggaagccttaaggaatatcttccaaagaataagaacaaaataaacctcaaacagcagctaaaatatgccgttcagatttgtaaggggatggactatttgggttctcggcaatacgttcaccgggacttggcagcaagaaatgtccttgttgagagtgaacaccaagtgaaaattggagacttcggtttaaccaaagcaattgaaaccgataaggagtattacaccgtcaaggatgaccgggacagccctgtgttttggtatgctccagaatgtttaatgcaatctaaattttatattgcctctgacgtctggtcttttggagtcactctgcatgagctgctgacttactgtgattcagattctagtcccatggctttgttcctgaaaatgataggcccaacccatggccagatgacagtcacaagacttgtgaatacgttaaaagaaggaaaacgcctgccgtgcccacctaactgtccagatgaggtttatcagcttatgagaaaatgctgggaattccaaccatccaatcggacaagctttcagaaccttattgaaggatttgaagcacttttaaaataagaagcatgaataacatttaaattccacagattatcaa

SEQ ID NO: 313 - DNA, 509 bp, Homo sapiens
cttccctcctgtccctgggctgtactgtcgacatgggcaccacctggaggagccctggactcgtgcggcttgcactgtgcctcgctggcttagccctctcactgtacgcactgcacgtgaaggcggcgcgcgcccgcgatgaaaattaccgcgcgctctgcgatgtgggcacggccatcagctgttcccgcgtcttctcctctcggtggggccggggctttgggctggtggagcacatgctaggagcggacaggtcctcaaccaatccaacagcatatttggttgcctgttctacaccttacagctgttgttaggttgcttgaggggacgttgggcctctatcctactggtgctgagttccctggtgtccgtcgctggttccgtgtacctggcctggatcctgttctttgtgttatatgatttctgcattgtgtgcattaccacctatgccatcaatgtgggtctgatgttgcttagcttccagaaggtaccagaacacaagaccaaaa

SEQ ID NO: 314 - DNA, 2342 bp, Homo sapiens
ctggggtcgtggccgtgggccggcaggggcgaggcgggcgtccggagggcggataaaaggggccgcgctgcgccggggccgctttctccgcgcggtgcctgcagggctcccagcgagtggcagcttgggaggggccgcccgggcggtcagactggcacctgagcggccaccgcgtcccggccaggcgggcagaccgaccccctcctcacctcgcgcgcggctgacgcaggcagggcgcccggcccctcctggggaccatcaggtgccggctgggggctgtaggcaccggacggaagcaggcggtgtgaggaccgacgacgcgggcatggcgggggcggcctgcgagccggtggccaggccgagcctgacctccatctcgtctggggagcttcgcagcctgtggacctgcgactgcgagctggccctgctgccgctggctcagctgctgcgcctgcagcccggtgccttccagctgagcggcgaccagctcgtggtggccgggcccggggagccggcggcggcgcgggggggcttcaacgtcttcggtgacggcctcgtgcgcctcgacgggcagctctaccgcctcagcagctacatcaagaggtatgtggaactgaccaactactgtgattataaagactacagggaaactatattgagcaaaccaatgttgttctttattaatgtacagaccaaaaaagacacctcaaaagaaaggacgtacgcgtttcttgtaaacacgaggcaccccaagataagaagacagatagagcaagggatggacatggtcatctcctcagtgattggagaaagttaccggcttcagtttgattttcaagaggcagtgaagaatttcttccccccaggaaatgaagtggttaatggagaaaatttaagctttgcatatgaattcaaagctgatgcattatttgatttcttctattggttcgggctcagtaattccgttgtaaaagtaaatggaaaagttctgaatttgtcaagtacaagtccagaaaagaaggagacgattaagttatttctggaaaaaatgagtgagcctttaatccgaaggagcagtttctctgaccgaaagttcagtgtaacttccagaggttcaatagatgatgtttttaactgcaatctgtcacccagatcatctctgacagagcctcttttggcagaattaccatttccaagtgttctggaatctgaagagacacccaaccaatttatctgattgaactgaacattgtagcagttgctcccgcactccaggcctgtgctagactataggctggggggagggtaggaggtgggaggcagatacttccacctgcgtgtcaatctccggctcctccatggcttctatggaggactcctctcttctgcttctgtggatgtgatgccctggcaggcccagggcagctgattcccctaaaacttatgattaccaggatggaaaggccttggtcccatggcactgggtggggctgggggatattctctactttgaacacttctccaaagaggcagaagggccacagagttctgccaccctgaacatttttctcagttccctgggagtttttgtggcagcctttgtgggagtggtctgactggctgttgacctagcatgcttcataaatcagggtttggccctctgcttggagcatccaaccccttgaactcaaacctgtcgagcaaggggttaagagttctgttctcttgccaacctggctgggcaaaagcctgtgccatctttcactgggaggcaaatatgtttttcatcctgccatatgacacctatgagaaacgttcacagtgaggagtagccaggttgctaggacagtaaccctgccacacactgcctgaaatcggaactcccttggcctccctcttaactaagtgacccatgtagaaggaagccaggagatatggtaccgaacaatgacaggggaagggtattggacacggcagcgtcctccttattgaaaacacattatgtcagttgggaattttaaataagcttttagcaaacctaacactaaaagcaaaatagaagaaagctataccattaccataatacatttttcatctcatggctacaatggaattcttgaaaaggaaaaaaaatcctatctacatataaaaacctgcatgaatgaatcactacatatgcttataatgaggaagagttatgggtcctgagtgtaattttttatcctttcttaaaaagtttctgtattatgcattttgataacactactgatgatccttccacttatatttgaaatgttatgtaccacatttgcacaattaaaacttttcttagcgttcaacct

SEQ ID NO: 315 - DNA, 403 bp, Homo sapiens
aattcggaacgaggagagccttcaagtaagtggaacattgaggacaaaggccctgaggtcagaggtcagcagctccctagaagggcaacaacccggatgtggaggtcagaggacaacttttgggagccggtgctctccttccggaaacctgatggaactcaggctctcaagtcttgccagaaagtgccgctctgagccatctcgaaggcccatcgccagactttattctttgggattcctttgttgttctgtttaggttttgttttggttttagagacagggtttctctgtgtagctgtggatatcctggaacttgctatatagatcaggccgccttttaactcagagatctgcttccgcctctcgagtgatgggattaaagaagtgagtcccattctggccc

SEQ ID NO: 316 - DNA, 2885 bp, Homo sapiens; identical to SEQ ID NO: 190

SEQ ID NO: 317 - DNA, 10412 bp, Homo sapiens; identical to SEQ ID NO: 56

SEQ ID NO: 318 - DNA, 378 bp, Homo sapiens
aacgagaccgcagggctgctttgcattcccatggtgcactctaccttcctcattgacctgcgtaaggctgcatccaggaacctggccttttacccaacacacccagactacacctggtcttttgatgacatcatcgtctttgccttctcctgtaaacaggcagaggtgcaaatgtacgtgtgcaataaggaggtgtacggcttcctgcccgtgccactgcgtgcgcacagcagcctgcaggacgaagcagagagcttcatgcacgtgcagctggaggtcatggtgaaacatccaccagtgcagctctcccgattcatctcagcacccaggaagacttctgacaagatgggcttcgatgaggtcttcatgatcaacctg

SEQ ID NO: 319 - DNA, 312 bp, Homo sapiens
gtgagttatactgaagacccggtaaggactacccttcggccactgtgggaaagaaggttaacctctgcttctgctcatcatgggagagatcaaagtctctccagattataattggtttagaagtactgttcccctgaaaaagataatcgtggatgacgatgacagtaagatctggtcgctctacgacgctggccccagaagcatcaggtgtcctctcatctttcttcctcctgtcagcggaactgcagatgtgtttttccagcagattctggctttgactggatggggttaccgggttatagctttgcagta

SEQ ID NO: 320 - DNA, 258 bp, Homo sapiens
tctgatcataaaatatttattaaggtatactcttaaggaatatagtgaatataaaatgtaggatcacaatgtgaagcaattttaatcttctcaaaagccagcacagccctcctaatctgcagatggagaccactaggaggaattcctgcacgccagatgaggacagagcggcttttcagaaacatttactactagcgcttcggacatctctgtcatggcaagaaaacaccacattacactaatgcagcaacaatgcat

SEQ ID NO: 321 - DNA, 1390 bp, Homo sapiens
gggaagtgctgttggagccgctgtggttgctgtccgcggagtggaagcgcgtgcttttgtttgtgtccctggccatggcgctgcagctctcccgggagcagggaatcaccctgcgcgggagcgccgaaatcgtggccgagttcttctcattcggcatcaacagcattttatatcagcgtggcatatatccatctgaaacctttactcgagtgcagaaatacggactcaccttgcttgtaactactgatcttgagctcataaaatacctaaataatgtggtggaacaactgaaagattggttatacaagtgttcagttcagaaactggttgtagttatctcaaatattgaaagtggtgaggtcctggaaagatggcagtttgatattgagtgtgacaagactgcaaaagatgacagtgcacccagagaaaagtctcagaaagctatccaggatgaaatccgttcagtgatcagacagatcacagctacggtgacatttctgccactgttggaagtttcttgttcatttgatctgctgatttatacagacaaagatttggttgtacctgaaaaatgggaagagtcgggaccacagtttattaccaattctgaggaagtccgccttcgttcatttactactacaatccacaaagtaaatagcatggtggcctacaaaattcctgtcaatgactgaggatgacatgaggaaaataatgtaattgtaattttgaaatgtggttttcctgaaatcaggtcatctatagttgatatgttttatttcattggttaatttttacatggagaaaaccaaaatgatacttactgaactgtgtgtaattgttcctttatttttttggtacctatttgacttaccatggagttaacatcatgaatttattgcacattgttcaaaaggaaccaggaggtttttttgtcaacattgtgatgtatattcctttgaagatagtaactgtagatggaaaaacttgtgctataaagctagatgctttcctaaatcagatgttttggtcaagtagtttgactcagtataggtagggagatatttaagtataaaatacaacaaaggaagtctaaatattcagaatctttgttaaggtcctgaaagtaactcataatctataaacaatgaaatattgctgtatagctccttttgaccttcatttcatgtatagttttccctattgaatcagtttccaattatttgactttaatttatgtaacttgaacctatgaagcaatggatatttgtactgtttaatgttctgtgatacagaactcttaaaaatgttttttcatgtgttttataaaatcaagttttaagtgaaagtgaggaaataaagttaagtttgttttaaaaaaaaaaaaaaaaaa

SEQ ID NO: 322 - DNA, 2012 bp, Homo sapiens
tctgaagcgaatcagtgggaagtggcctacagtgggtcggctaccgaatacaccttcacccacttgaaaccaggcactttgtacaaactccgagcatgctgcatcagtaccggcggacacagccagtgttctgaaagtctccctgttcgcacactaagcattgcaccaggtcaatgtcgaccaccgagggttttgggtagaccaaagcacaaagaagtccacttagagtgggatgttcctgcatcggaaagtggctgtgaggtctcagagtacagcgtggagatgacggagcccgaagacgtagcctcggaagtgtaccatggcccagagctggagtgcaccgtcggcaacctgcttcctggaaccgtgtatcgcttccgggtgagggctctgaatgatggagggtatggtccctattctgatgtctcagaaattaccactgctgcagggcctcctggacaatgcaaagcaccttgtatttcttgtacacctgatggatgtgtcttagtgggttgggagagtcctgatagttctggtgctgacatctcagagtacaggttggaatggggagaagatgaagaatccttagaactcatttatcatgggacagacacccgttttgaaataagagacctgttgcctgctgcacagtattgctgtagactacaggccttcaatcaagcaggggcagggccgtacagtgaacttgtcctttgccagacgccagcgtctgcccctgaccccgtctccactctctgtgtcctggaggaggagccccttgatgcctaccctgattcaccttctgcgtgccttgtactgaactgggaagagccgtgcaataacggatctgaaatccttgcttacaccattgatctaggagacactagcattaccgtgggcaacaccaccatgcatgttatgaaagatctccttccagaaaccacctaccggatcagaattcaggctataaatgaaattggagctggaccatttagtcagttcattaaagcaaaaactcggccattaccacccttgcctcctaggctagaatgtgctgctgctggtcctcagagcctgaagctaaaatggggagacagtaactccaagacacatgctgctgaggacattgtgtacacactacagctggaggacagaaacaagaggtttatttcaatctacagaggacccagccacacctacaaggtccagagactgacggaattcacatgctactccttcagaatccaggcagcaagcgaggctggagaagggcccttctcagaaacctataccttcagcacaaccaaaagtgtcccccccaccatcaaagcacctcgagtaacacagttagaaggaaattcatgtgaaattttatgggagacggtaccatcaatgaaaggtgaccctgttaactacattctgcaggtattggttggaagagaatctgagtacaaacaggtgtacaagggagaagaagccacattccaaatctcaggcctccagaccaacacagactacaggttccgcgtatgtgcgtgtcgtcgctgtttagacacctctcaggagctaagcggagccttcagcccctctgcggcttttgtattacaacgaagtgaggtcatgcttacaggggacatggggagcttagatgatcccaaaatgaagagcatgatgcctactgatgaacagtttgcagccatcattgtgcttggctttgcaactttgtccattttatttgcctttatattacagtacttcttaatgaagtaaacccaacaaaactagaggtatgaattaatgctacacattttaatacacacatttattcagatactcccctttttaaagcccttttgttttttgatttatatactctgttttacagatttagctagaaaaaaaatgtcagtgttttggtgcacctttttgaaatgcaaaactaggaaaaggttaaactggatttttttttttaaaaaaaaaaaaaaaaaaaaaaaaaaaaaaaaaaaaaaaaa

SEQ ID NO: 323 - DNA, 874 bp, Homo sapiens
gttccgaggaagccagagccggagccgtggcctgccgggccggcgacatggatcccctgttccagcaaacgcacaagcaggtccacgagatccagtcttgcatgggacgcctggagacggcagacaagcagtctgtgcacatagtagaaaacgaaatccaagcaagcatagaccagatattcagccgtctagaacgtctggagattttgtccagcaaggagccccctaacaaaaggcaaaatgccagacttcgggttgaccagttaaagtatgatgtccagcacctgcagactgcgctcagaaacttccagcatcggcgccatgcaagggagcagcaggagagacagcgagaagagcttctgtctcgaaccttcaccactaacgactctgacaccaccataccaatggacgaatcactgcagtttaactcctccctccagaaagttcacaacggcatggatgacctcattttagatgggcacaatattttagatggactgaggacccagagactgaccttgaaggggactcagaagaagatccttgacattgccaacatgctgggcttgtccaacacagtgatgcggctcatcgagaagcgggctttccaggacaagtactttatgataggtgggatgctgctgacctgtgtggtcatgttcctcgtggtgcagtacctgacatgagccagccacgctcagtggctgaacagcattcccacagcctgcaagtgtgtgtgtgtgtgaaagagagaggggggcccagaggccgccttttgaaatgtttgcctgtctgaactgtgaagacacttgggagtgattgtggtctaatttccaaaaaaaaaaaaaaaaaaaaaaaaaaaaaaaaaaaaaaa

SEQ ID NO: 324 - DNA, 1985 bp, Homo sapiens
cccgggcaggttagaagacagcaggggaactcgagaagttggttgttttcagcagattaaaacaatacagatttatcagcaagactgttcaacgcataactgcccaagatgcctgtccctccccctccagcacccccgccgcccccgacgtttgcactggccaatacagagaagcctaccttgaataagacagagcaggctgggagaaatgctctcctttctgatatcagcaaagggaagaaactaaagaagacggtcaccaatgacagaagtgcaccaatactggacaaacctaaaggagctggtgctggaggcggtggtggtggctttggtggaggcggcggatttggcggaggaggtggtggcggaggcggtggaagttttggagggggcggacctccaggtctgggaggattgttccaggctggaatgccgaagctgagatccacggccaacagggataatgattctggaggaagccgaccaccattgttgccaccgggaggaagatccacatctgcgaaacccttttcacccccaagtggcccagggaggtttcctgtgccttctccaggccacagaagtggtcccccagagcctcagaggaaccgaatgccgcccccaaggcccgacgtgggctcaaagcctgatagcattcctcctccagtacctagtactccaagacccattcaatcaagtctgcacaaccgggggtccccaccagtgcccggaggccccaggcagcccagccccgggcccactcctccccctttccctggaaaccgcggcactgctttgggaggaggctcaatacgtcagtcccccttgagctcctcctcgcccttctccaaccggcctcccctgccgcctacccccagcagggccttggatgacaaaccccctccaccacctcctccagtgggcaacaggccctccatccacagggaagcggttccccctcctcctcctcagaacaacaagcctccagtgccttccactccgcggccttcggctcctcacaggccccacctccgcccgccacctcccagcaggcccgggccgcctcctctgcctccaagttccagcggcaatgacgaaaccccaagactcccacagcggaatctgtccctcagttcgtccacgcccccgttaccttcgccaggacgttcaggtcctcttcctcccccgcccagtgagagacccccacctccagtgagggacccgccaggccgatcaggccccctcccaccacctcctccagtaagcagaaacggcagcacatctcgggccctgcctgctacccctcagttgccatccaggagtggagtagacagtcccaggagtggacccaggcctccccttcctcctgataggcccagtgctggggcacctcccccacctccaccatcaacatctattagaaatggcttccaagactctccatgtgaagatgagtgggaaagcagattctacttccatccgatttccgatttgccacctccagagccatatgtacaaacgaccaaaagttatcccagcaaactggcaagaaacgaaagccggagtggatccaaccgaagagaaaggggtgctccaccactccctcccatcccgaggtgatctttgcctgctcgtctctacccaagctcaagagctgcttctgttgctatctaagaactgcataccctcctcctgcttcttcccttgtgcctcatgtatgggcaggaggaaaggtgggagggggagtgggaatatgcgtgtgtgggtgggaatcggtaagaaatgcacctagcttttcatattgtgtttattctccaggctattgcttgcttcagctgcagcctgcctgtgctggctgctggggtcgataggcttttgtcgtaataggcagagatgacttgcatcccagctttccaccaaccaaattcaaacattcactgcttatttgttacagactgtaattattaaagtccctgagagctgtt

SEQ ID NO: 325 - DNA, 2764 bp, Homo sapiens
ctctaaagcttagagccaagatggcgggatccaggcaaaggggtctccgggccagagttcggccgctgttctgcgccttgctgctgtcactcggtcgcttcgtccggggcgacggcgtgggaggagaccccgcggtcgcgttgccacatcgccgtttcgagtacaaatacagcttcaaggggccgcacctggtgcagagcgacgggaccgtgcccttctgggcccacgcggggaatgctattccaagttcagatcaaattcgagtagcaccatctttaaaaagccaaagaggctcagtgtggacaaagacaaaagcggcctttgagaactgggaagttgaggtgacatttcgagtgactggaagaggtcgaattggagctgatggcctagcaatttggtatgcagaaaatcaaggcttggagggccctgtgtttggatcagctgatctgtggaatggtgttggaatattttttgattcttttgacaatgatggaaagaaaaataatcctgctatagtaattataggcaacaatggacaaatccattatgaccatcaaaatgacggggctagtcaagctttggcaagttgccagagggacttccgcaacaaaccctatcctgtccgagcaaagattacctattaccagaacacactgacagtaatgatcaataatggctttacaccagataaaaatgattatgaattttgtgccaaagtggaaaatatgattatccctgcacaagggcattttggaatatctgctgcaactggaggtcttgcagatgaccatgatgtcctttcttttctgactttccagttgactgaacctggaaaagagccgcccacaccagataaagaaatttcggaaaaggaaaaagaaaagtatcaggaggaatttgagcactttcaacaagaattggataaaaaaaaagaggaattccagaagggccaccccgacctccaagggcagcctgcggaggaaatatttgagagtgtaggagatcgagagctaagacaagtctttgaaggacagaatcgtattcatcttgaaatcaagcagctgaaccggcagttagatatgattcttgatgaacagagaagatatgtctcttccttaacagaggaaatctctaaaagaggagcaggaatgcctgggcagcatgggcagattactcaacaagaactggatactgttgtgaaaactcagcatgagattctgagacaagtaaatgaaatgaaaaattccatgagtgaaaccgtcagactggtcagtggaatgcagcaccctggctctgctggaggcgtctatgagacaacacagcacttcattgacatcaaagagcacctgcacatagtaaagagggacatagataacttagtgcagcgaaatatgccatcaaatgaaaagccgaaatgcccagaactaccaccatttccatcatgtttgtctacggtccacttcattatatttgttgtggtgcaaactgtattattcattggttatatcatgtataggtctcagcaagaagcagctgccaaaaaattcttttgactaccattttcctgtgtacttcatctatttgtgtacaaaatgatgtcgttttgagggaatttaagtatttaaattgcttcatagtctaaattattaattttcttaataaaataactgtttaaacattgatttgcagttaagaataaaccttaaagcaaagacaaccacattttaatttgttcacagtatgtaaatctgtctaaatttcagtgaatttctggtcagtatgatgcagcctctgagcagatattgaccagtaagagggtaaataaagtgggggcaacccctggatatgaatgttaccccctaagtctccaatattgcaggtttccctgtataacgtaaacacacttgccctcatgcctcccagaatatgaggtctaattaagaagtcccatcaggtttattttgtaaccaaagtcttttttagaggtcagacttcctaatcaaaggcctgggcctgcagtcctttcatcttaatgcaacttcctttgaaatcaaagaatattttgtctgagagctttaaggatctggtaatagacttcaaaatgttaagtgaaattttttttcctctatttatcaatgatatatttcacttttaaaggaaattttggaggaaaatatagctgctttttgcctaaaaaaccttgtgggtggaaatattcctctgagaatggcttttataggtattttgcctggtaatgtattcattcatgattgcccatattcttgaatgtttcttcattccaatggggtcaggtcaatattatgaaaataatttttatatttatatttgtaactaagaatttatttctccctttactacacgatgtaaattcacgtcaaattcgatgatctgaggatttaaattcacaaaacctgccactacattctggtttacattagttacttcatgctggctggggttagtgaccatttgcatactcttttaaatcaaggaggctgtagtagaggcagttttaagattcttgaaggcaaaatttgaaaaacagtgaatacttctaattgtttccttttagtgccagaactaagacattgtgaagcacttgttagtaaacttaaccttgaaatgtcagactggaaggagtttttatgtctttgtgcatacttctgggtattacagaaacagtctgtaaataacattttaagatgcaaatttaattctgttcacagctgatttatactgattt

SEQ ID NO: 326 - DNA, 3106 bp, Homo sapiens
ggcggcggctcctgccctctcgctttccctctcgcgtctctggctgcaggtgaaaggaaagcaagccaggatggatatttacgacactcaaaccttgggggttgtggtctttggaggattcatggttgtttctgccattggcatcttcctggtgtcgactttctccatgaaggaaacgtcatatgaagaagccctagccaaccagcgcaaggagatggcgaaaactcaccaccagaaagtcgagaagaaaaagaaggagaaaacagtggagaagaaaggaaagaccaagaaaaaggaagagaaacctaatgggaagatacctgatcatgatccagcccccaatgtgactgtcctccttcgagaaccagtgcgggctcctgctgtggctgtggctccaaccccagtgcagccccccattatcgttgctcctgtcgccacagttccagccatgccccaggagaagctggcctcctcccccaaggacaaaaagaagaaggagaaaaaagtggcaaaagtggaaccagctgtcagctctgtagtgaattccatccaggttctcacttcgaaggctgccatcttggaaactgctcccaaggagggcagaaatacagatgtggcccagagcccagaggcaccaaagcaagaggctcctgccaagaagaagtctggttcaaagaaaaaagggcccccagatgccgacggccctctctacctcccctacaagacgctggtctccacggttgggagcatggtgttcaacgagggcgaggcccagcggctcatcgagatcctgtctgagaaggctggcatcattcaggacacctggcacaaggccactcagaagggtgaccctgtggcgattctgaaacgccagctggaagagaaggaaaaactgctggccacagaacaggaagatgcggctgtcgccaagagcaaactgagggagctcaacaaggagatggcagcagaaaaggccaaagcagcagccggggaggccaaagtgaaaaagcagctggtggcccgggagcaggagatcacggctgtgcaggcacgcatgcaggccagctaccgggagcacgtgaaggaggtgcagcagctgcagggcaagatccggactcttcaggagcagctggagaatggccccaacacgcagctggcccgcctgcagcaggagaactccatcctgcgggatgccttgaaccaggccacgagccaggtggagagcaagcagaacgcagagctggccaagcttcggcaggagctcagcaaggtcagcaaagagctggtggagaagtcagaggctgtgcggcaagatgagcagcagcggaaagctctggaagccaaggcagctgccttcgagaagcaggtcctgcagctgcaggcgtcccacagggagagtgaggaggccctgcagaagcgcctggacgaggtcagccgggagctgtgccacacgcagagcagccacgccagcctccgggcggatgccgagaaggcccaggagcaacagcagcagatggccgagctgcacagcaagttacagtcctccgaggcggaggtgcgcagcaaatgcgaggagctgagtggcctccacgggcagctccaggaggccagggcagagaactcccagctcacagagagaatccgttccattgaggccctgctggaggcgggccaggcgcgggatgcccaggacgtccaggccagccaggcggaggctgaccagcagcagactcgcctcaaggagctggagtcccaggtgtcgggtctggagaaggaggccatcgagctcagggaggccgtcgagcagcagaaagtgaagaacaatgacctccgggagaagaactggaaggccatggaggcactggccacggccgagcaggcctgcaaggagaagctgcactccctgacccaggccaaggaggaatcggagaagcagctctgtctgattgaggcgcagaccatggaggccctgctggctctgctcccagaactctctgtcttggcacaacagaattacaccgagtggctgcaggatctcaaagagaaaggccccacgctgctgaagcacccgccagctcccgcggagccctcctcggacctggcctccaagttgagggaggccgaggagacgcagagcacactgcaggccgagtgtgaccagtaccgcagcatcctggcggagacggagggcatgctcagagacctgcagaagagcgtggaggaggaggagcaggtgtggagggccaaggtgggcgccgcagaggaggagctccagaagtcccgggtcacagtgaagcatctcgaagagattgtagagaagctaaaaggagaacttgaaagttcggaccaggtgagggagcacacgtcgcatttggaggcagagctggaaaagcacatggcggccgccagcgccgagtgccagaactacgccaaggaggtggcagggctgaggcaacttctcctagaatctcaatctcagctcgatgccgccaagagcgaagcccagaaacagagcgatgagcttgccctggtcaggcagcagttgagtgaaatgaagagccacgtagaggatggtgacatagctggggccccagcttcctccccagaggcgcccccagccgagcaggaccccgttcagctgaagacgcagctggagtggacagaagccatcctggaggatgagcagacacagcggcagaagctcatggccgagtttgaggaggctcagacctcggcatgtcggttacaagaagaattggagaagctccgcacagccggccccctagagtcttcagaaacagaggaggcctcacagctgaaggagagactagaaaaagagaagaagttaacaagtgacctggggcgcgccgccacgagactgcaggagcttctgaagacgacccaggagcagctggcaagggagaaggacacggtgaagaagctgcaggaacagctggaaaaggcagaggacggcagcagctcaaaggagggcacctctgtctgagtttcctctttggaaaaagaagttactgttcaacttaccaaaatgccttacacattccttacaaataaaccaaccaacctacaaaaaaaaaaaaaaaaaaaa

SEQ ID NO: 327 - DNA, 365 bp, Homo sapiens
ggaattctcctcagatgggaagtgtacctgtaatgacacaaccaaccttaatatacagccagcctgtcatgagaccaccaaacccctttggccctgtatcaggagcacagatacagtttatgtaactagatggaagagaatggaattactccaagaatacaagtgcacaggcggcaactccttacttccagcaaaattgaaactgctgtctctgaaactcttcctccattagagcgctccagtaacccatgaaggcccacagcgggatgggactagtttataggagagcgttgtcaataccacttataaagccaagaattgccatgatttaagactaagatctgtctttttggtgactaacactt

SEQ ID NO: 328 - DNA, 428 bp, Homo sapiens
gtcttattccaggacttttctgctgtggtctaatgatatacccagcagggaatatggcagagtccaacccttttcagccagggctatacggcgaaactctgtctcaaataataaaaaggcttagttgccttcaatacattgagcattgtactaataccaagtgttgggcaacaaaaggtctctccagcagcaaagtagtgatagaaaaagaaattggcttaacttcatctccattgttcagggaacaacaaatggaagcttgactttgccaagacttgaattccttcgggaatgacactaataaaagaccaagacctcctgattgaactggatgtggagtgctctgtaggctgcacatttttggctttgtagttttcctttctcagttaacatctcacactgaaacattccacattccccagcagtgc

SEQ ID NO: 329 - DNA, 461 bp, Homo sapiens
gtgtgcaaaccatgaggaattttttattgggtcctgtacagaaaagaaacgctgttttgttttgttttgttttttccaaaaaaaaaaaaaatacaaaacgaatccctgcctctgggctgggtggtggtatagagatagctagagctgtcagcaaacagggaggctggacttagtgtgggaaagagccctaggtgcctacggccctcagttcagggtttgcccttaaagttttgtaaaaatcaggagtgactgagggggactatgtccccactacaagtattgccattgaatacaaaatacagagtgaaacccaagtggtaaattggtcatttgagacctgtgagagagacagtggctagctggtggcctctgcccctgtatgacatgtcagtccctgaaggcacagcagcaaatggccagaggcagcttctcccaaatccaatcatggaccacagtcccct

SEQ ID NO: 330 - DNA, 3314 bp, Homo sapiens
ggaggcaggcggtgccgcggcgccgggacccgactcatccggtgcttgcgtgtggtggtgagcgcagcgccgaggatgaggaggtgcaacagcggctccgggccgccgccgtcgctgctgctgctgctgctgtggctgctcgcggttcccggcgctaacgcggccccgcggtcggcgctctattcgccttccgacccgctgacgctgctgcaggcggacacggtgcgcggcgcggtgctgggctcccgcagcgcctgggccgtggagttcttcgcctcctggtgcggccactgcatcgccttcgccccgacgtggaaggcgctggccgaagacgtcaaagcctggaggccggccctgtatctcgccgccctggactgtgctgaggagaccaacagtgcagtctgcagagacttcaacatccctggcttcccgactgtgaggttcttcaaggcctttaccaagaacggctcgggagcagtatttccagtggctggtgctgacgtgcagacgctgcgggagaggctcattgacgccctggagtcccatcatgacacgtggcccccagcctgtcccccactggagcctgccaagctggaggagattgatggattctttgcgagaaataacgaagagtacctggctctgatctttgaaaagggaggctcctacctgggtagagaggtggctctggacctgtcccagcacaaaggcgtggcggtgcgcagggtgctgaacacagaggccaatgtggtgagaaagtttggtgtcaccgacttcccctcttgctacctgctgttccggaatggctctgtctcccgagtccccgtgctcatggaatccaggtccttctataccgcttacctgcagagactctctgggctcaccagggaggctgcccagaccacagttgcaccaaccactgctaacaagatagctcccactgtttggaaattggcagatcgctccaagatctacatggctgacctggaatctgcactgcactacatcctgcggatagaagtgggcaggttcccggtcctggaagggcagcgcctggtggccctgaaaaagtttgtggcagtgctggccaagtatttccctggccggcccttagtccagaacttcctgcactccgtgaatgaatggctcaagaggcagaagagaaataaaattccctacagtttctttaaaactgccctggacgacaggaaagagggtgccgttcttgccaagaaggtgaactggattggctgccaggggagtgagccgcatttccggggctttccctgctccctgtgggtcctcttccacttcttgactgtgcaggcagctcggcaaaatgtagaccactcacaggaagcagccaaggccaaggaggtcctcccagccatccgaggctacgtgcactacttcttcggctgccgagactgcgctagccacttcgagcagatggctgctgcctccatgcaccgggtggggagtcccaacgccgctgtcctctggctctggtctagccacaacagggtcaatgctcgccttgcaggtgcccccagcgaggacccccagttccccaaggtgcagtggccaccccgtgaactttgttctgcctgccacaatgaacgcctggatgtgcccgtgtgggacgtggaagccaccctcaacttcctcaaggcccacttctccccaagcaacatcatcctggacttccctgcagctgggtcagctgcccggagggatgtgcagaatgtggcagccgccccagagctggcgatgggagccctggagctggaaagccggaattcaactctggaccctgggaagcctgagatgatgaagtcccccacaaacaccaccccacatgtgccggctgagggacctgaggcaagtcgacccccgaagctgcaccctggcctcagagctgcaccaggccaggagcctcctgagcacatggcagagcttcagaggaatgagcaggagcagccgcttgggcagtggcacttgagcaagcgagacacaggggctgcattgctggctgagtccagggctgagaagaaccgcctctggggccctttggaggtcaggcgcgtgggccgcagctccaagcagctggtcgacatccctgagggccagctggaggcccgagctggacggggccgaggccagtggctgcaggtgctgggagggggcttctcttacctggacatcagcctctgtgtggggctctattccctgtccttcatgggcctgctggccatgtacacctacttccaggccaagataagggccctgaagggccatgctggccaccctgcagcctgaaccacctggggaggaggcgggagagggagctgccatctctaggcacctcaagccccctgaccccattccctcccctcccaccccttgctccttgtctggcctagaagtgtgggaaattcaggaaaacgagttgctccagtgaagcttcttggggttgctaggacagagagctcctttgacacaaaagacaggagcagggtccaggttcccctgctgtgcagggagggcagccccgggcagtgggcatagggcagctcagtccctggcctcttagcaccacattcctgtttttcagcttatttgaagtcctgcctcattctcactggagcctcagtctctcctgcttggtcttggccctcaactggggcaagtgaagccagaggagggtcccccagctgggtgggctggaatggaactcctcactagctgctggggctccgcccaccctgctcccttccggacaatgaagaagcctttgcaccctgggaggaaggaccaccccgggccctctatgcctggccagcctccagctcctcagacctcctgggtggggtttggcttcagggtggggtttggaagcttctggaagtcgtgctggtctcccaggtgaggcaagccatggttgctgggctgtagggtgagtggcttgcttggtgggacctgacgagttggtggcatgggaaggatgtgggtctctagtgccttgccctggcttagctgcaggagaagatggctgctttcacttccccccattgagctctgctccctctgagcctggtcttttgtccttttttattttggtctccaagatgaatgctcatctttggagggtgccaggtagaagctagggaggggagtgtcttctctctccaggtttcaccttccagtgtgcagaagttagaagggtctggcgggggcagtgccttacacatgcttgattcccacgctaccccctgccttgggaggtgtgtggaataaattatttttgttaaggc

SEQ ID NO: 331 - DNA, 1186 bp, Homo sapiens
aagtgcgatcttcgggctgtcagagttggtctgttactcggtggtggcggagtctacggaagccgttttcgcttcacttttcctggctgtagagcgctttccccctggcgggtgagagtgcagagacgaaggtgcgagatgagcactatgttcgcggacactctcctcatcgtttttatctctgtgtgcacggctctgctcgcagagggcataacctgggtcctggtttacaggacagacaagtacaagagactgaaggcagaagtggaaaaacagagtaaaaaattggaaaagaagaaggaaacaataacagagtcagctggtcgacaacagaaaaagaaaatagagagacaagaagagaaactgaagaataacaacagagatctatcaatggttcgaatgaaatccatgtttgctattggcttttgttttactgccctaatgggaatgttcaattccatatttgatggtagagtggtggcaaagcttccttttacccctctttcttacatccaaggactgtctcatcgaaatctgctgggagatgacaccacagactgttccttcattttcctgtatattctctgtactatgtcgattcgacagaacattcagaagattctcggccttgccccttcacgagccgccaccaagcaggcaggtggatttcttggcccaccacctccttctgggaagttctcttgaactcaagaactctttattttctatcattctttctagacacacacacatcagactggcaactgttttgtagcaagagccataggtagccttactacttgggcctctttctagttttgaattatttctaagccttttgggtatgattagagtgaaaatggcagccagcaaacttgatagtgcttttggtcctagatgatttttatcaaataagtggattgattagttaagttcaggtaatgtttatgtaatgaaaaacaaatagcatccttcttgtttcatttacataagtattttctgtgggaccgactctcaaggcactgtgtatgccctgcaagttggctgtctatgagcatttagagatttagaagaaaaatttagtttgtttaacccttgtaactgtttgttttgttgttgtttttttttcaagccaaatacatgacataagatcaataaagaggccaaatttttagctgttttatgt

SEQ ID NO: 332 - DNA, 469 bp, Homo sapiens
gccaaaattcaggaaaaggaaacttctgagaaaccgaaactgccgcagaaagggcagacccgcagcgcgctccatcctttgcccttcagtgctgcctttgctccgcaccatgaaccacacttctcaagccttcatcaccgctgccagtggaggacagcccccaaactacgaaagaatcaaggaagaatatgaggtggctgagatgggggcaccgcacggatcggcttctgtcagaactactgtgatcaacatgcccagagaggtgtcggtgcctgaccatgtggtctggtccctgttcaatacactcttcatgaacttctgctgcctgggcttcatagcctatgcctactccgtgaagtctagggatcggaagatggtgggtgatgtgactggagcccaggcctacgcctccactgctaagtgcctgaacatcagcaccttggtcctcagcatcctgatggttgttatc

SEQ ID NO: 333 - DNA, 540 bp, Homo sapiens
ggcagatgcagtggaatggtttttaaggctattcattcacagggagagtctttttttaaaaaaaaaacaaaacacttcagcactgctgctgtaaagaattccctgaattgttgaattgttacaaaggaaattatacttcaggccaaaaacccctttgatcttgcagagattccgatactcggtaactctcagaatgctgaagcgtgtgacacacgagccgacagcactttattctctcgctcgccattatttgctattcattatagtctcttcagtcaggaagttattcctctacatggcactattctctatcacatatctgtatatgtgctatggatatataactatatatattgccatttcaaaggaacaataaaaccaagtgttctgttgaccttgtctgtgccctttgccatacgtaggaatgagtgagtggctttccgatgttctgatgcgtctctgtgtgtcacatgcatccctgacacaggaaattccaggcatctgaagcaaactgccctttgtcctcaaagaaaatgttta

SEQ ID NO: 334 - DNA, 422 bp, Homo sapiens
cattgttgccgccacaagtaaaccagtcccttgcttctatgccaccaatgaacccagctaccacattaccaagtctgatgcctttgtcagcagggctgcctagcctccccaacctccccagcctctccaacttcaacctccctgctccgcacatcatgccaggggtcggtttgccagagctcgggagcccgggtttgccacctcttccctccttgcctccccgaaacttacctggcattgcacctctccccatgctgtccgacttcctcccgtcattccctttggttccagagggctcttctgcagccagcgcaggggagccgctgtcttcccttcctgccatgggcccaccttctgaccctgtcatgactactgcaaaggcagacgcctcttccctcactgtggatgtgacgtctcctgct

SEQ ID NO: 335 - DNA, 3389 bp, Homo sapiens
ggcacgaggggcgcggaggatgaggccgctgcctggcgctcttggcgtggcggccgccgcgctgtggctgctgctgctgctgctgccccggacccgggcggacgagcacgaacacacgtatcaagataaagaggaagttgtcttatggatgaatactgttgggccctaccataatcgtcaagaaacatataagtacttttcacttccattctgtgtggggtcaaaaaaaagtatcagtcattaccatgaaactctgggagaagcacttcaaggggttgaattggaatttagtggtctggatattaaatttaaagatgatgtgatgccagccacttactgtgaaattgatttagataaagaaaagagagatgcatttgtatatgccataaaaaatcattactggtaccagatgtacatagatgatttaccaatatggggtattgttggtgaggctgatgaaaatggagaagattactatctttggacctataaaaaacttgaaataggttttaatggaaatcgaattgttgatgttaatctaactagtgaaggaaaggtgaaactgggttccaaatactataatccagatgtcatattcagtaaaatggaaaagtcagatgtgaaatttgaagatcgatttgacaatatcttgatcgtccttttttcacatcggattcattggttttcaattttcaactccttcatgatggtgatcttcttggtgggcttagtttcaatgattttaatgagaacattaagaaaagattatgctcggtacagtaaagaggaagaaatggatgatatggatagagacctaggagatgaatatggatggaaacaggtgcatggagatgtatttagaccatcaagtcacccactgatattttcctctctgattggttctggatgtcagatatttgctgtgtctctcatcgttattattgttgcaatgatagaagatttatatactgagaggggatcaatgctcagtacagccatatttgtctatgctgctacgtctccagtgaatggttattttggaggaagtctgtatgctagacaaggaggaaggagatggataaagcagatgtttattggggcattccttatcccagctatgggtgtgcactgccttcttcatcaatttcatagccatttattaccatgcttcaagagccattccttttggaacaatggtggccgtttgttgcatctgtttttttgttattcttcctctaaatcttgttggtacaatacttggccgaaatctgtcaggtcagcccaactttccttgtcgtgtcaatgctgtgcctcgtcctataccggagaaaaaatggttcatggagctgcggttattgtttgcctgggtggaattttaccttttggttcaatctttattgaaatgtatttcatcttcacgtctttctgggcatataagatctattatgtctatggcttcatgatgctggtgctggttatcctgtgcattgtgactgtctgtgtgactattgtgtgcacatattttctactaaatgcagaagattaccggtggcaatggacaagttttctctctgctgcatcaactgcaatctatgtttacatgtattccttttactactattttttcaaaacaaagatgtatggcttatttcaaacatcattttactttggatatatggcggtatttagcacagccttggggataatgtgtggagcgattggttacatgggaacaagtgcctttgtccgaaaaatctatactaatgtgaaaattgactagagacccaagaaaacctggaactttggatcaatttctttttcataggggtggaacttgcacagcaaaaacaaacaaacgcaagaagagatttgggctttaacacactgggtactttgtgggtctctctttcgtcggtggcttaaagtaacatctatttccattgatcctaggttcttcctgactgctttctccaactgttcacagcaaatgcttggattttatgcagtaggcattactacagtacatggctaatcttcccaaaaactagctcattaaagatgaaatagaccagctctcttcagtgaagaggacaaatagtttatttaaagcatttgttccaataaaataaatagagggaaacttggatgctaaaattacatgaataggaatcttcctggcacttagtgtttctatgttattgaaaaatgatgttccagaaagattacttttttcctcttatttttactgccattgtcgacctattgtgggacatttttatatattgaatctgggttcttttttgactttttttttttcccaatccaacagcatccttttttttaaaagagagaattagaaaatattaaatcctgcatgtaatatatctgctgtcatcttagttggaccaacttcccatttatttatcttaaaactatacagttacatcttaattccatccaaagaagatacagtttgaagacagaagtgtactctctacaatgcaatttactgtacagttagaaagcaaagtgttaaatggagaagatacttgtttttattaaacattttgagatttagataaactacattttaactgaatgtctaaagtgattatcttttttccccccaagttagtcttaaatcttttgggtttgaatgaaggttttacataagaaattattaaaaacaaggggggtgggtaataaatgtatataacattaaataatgtaacgtaggtgtagattcccaaatgcatttggatgtacagatcgactacagagtacttttttcttatgatgattggtgtagaaatgtgtgatttgggtgggcttttacatcttgcctaccattgcatgaaacattggggtttcttcaaaatgtgtgtgtcatacttcttttgggaggggggttgttttcttctgtttattttctgagactcctacaggagccaaatttgtaatttagagacacttaattttgttaatcctgtctgggacacttaagtaacatctaaagcattattgctttagaatgttcaaataaaatttcctgaccaaattgttttgtggaaatagatgtgtttgcaatttgaagatatctttctgtccagaaggcaaaattaccgaatgccatttttaaaagtatgctataaactatgctactctcatacaggggacccgtattttaaaatctccagacttgcttacatctagattatccagcacaatcataaagtgaatgacaaaccctttgaatgaaattgtggcacaaaatctgttcaggttggtgtaccgtgtaaagtggggatggggtaaaagtggttaacgtactgttggatcaacaaataaaggttacagttttgtaagagaaaaaaaaaaaaaaaaaaaaa

SEQ ID NO: 336 - DNA, 2781 bp, Homo sapiens
atggatatgtttcctctcacctgggttttcttagccctctacttttcaagacaccaagtgagaggccaaccagacccaccgtgcggaggtcgtttgaattccaaagatgctggctatatcacctctcccggttacccccaggactacccctcccaccagaactgcgagtggattgtttacgcccccgaacccaaccagaagattgtcctcaacttcaaccctcactttgaaatcgagaagcacgactgcaagtatgactttatcgagattcgggatggggacagtgaatccgcagacctcctgggcaaacactgtgggaacatcgccccgcccaccatcatctcctcgggctccatgctctacatcaagttcacctccgactacgcccggcagggggcaggcttctctctgcgctacgagatcttcaagacaggctctgaagattgctcaaaaaacttcacaagccccaacgggaccatcgaatctcctgggtttcctgagaagtatccacacaacttggactgcacctttaccatcctggccaaacccaagatggagatcatcctgcagttcctgatctttgacctggagcatgaccctttgcaggtgggagagggggactgcaagtacgattggctggacatctgggatggcattccacatgttggccccctgattggcaagtactgtgggaccaaaacaccctctgaacttcgttcatcgacggggatcctctccctgacctttcacacggacatggcggtggccaaggatggcttctctgcgcgttactacctggtccaccaagagccactagagaactttcagtgcaatgttcctctgggcatggagtctggccggattgctaatgaacagatcagtgcctcatctacctactctgatgggaggtggacccctcaacaaagccggctccatggtgatgacaatggctggacccccaacttggattccaacaaggagtatctccaggtggacctgcgctttttaaccatgctcacggccatcgcaacacagggagcgatttccagggaaacacagaatggctactacgtcaaatcctacaagctggaagtcagcactaatggagaggactggatggtgtaccggcatggcaaaaaccacaaggtatttcaagccaacaacgatgcaactgaggtggttctgaacaagctccacgctccactgctgacaaggtttgttagaatccgccctcagacctggcactcaggtatcgccctccggctggagctcttcggctgccgggtcacagatgctccctgctccaacatgctggggatgctctcaggcctcattgcagactcccagatctccgcctcttccacccaggaatacctctggagccccagtgcagcccgcctggtcagcagccgctcgggctggttccctcgaatccctcaggcccagcccggtgaggagtggcttcaggtagatctgggaacacccaagacagtgaaaggtgtcatcatccagggagcccgcggaggagacagtatcactgctgtggaagccagagcatttgtgcgcaagttcaaagtctcctacagcctaaacggcaaggactgggaatacattcaggaccccaggacccagcagccaaagctgttcgaagggaacatgcactatgacacccctgacatccgaaggtttgaccccattccggcacagtatgtgcgggtatacccggagaggtggtcgccggcggggattgggatgcggctggaggtgctgggctgtgactggacagactccaagcccacggtaaaaacgctgggacccactgtgaagagcgaagagacaaccaccccctaccccaccgaagaggaggccacagagtgtggggagaactgcagctttgaggatgacaaagatttgcagctcccttcgggattcaattgcaacttcgatttcctcgaggagccctgtggttggatgtatgaccatgccaagtggctccggaccacctgggccagcagctccagcccaaacgaccggacgtttccagatgacaggaatttcttgcggctgcagagtgacagccagagagagggccagtatgcccggctcatcagcccccctgtccacctgccccgaagcccggtgtgcatggagttccagtaccaggccacgggcggccgcggggtggcgctgcaggtggtgcgggaagccagccaggagagcaagttgctgtgggtcatccgtgaggaccagggcggcgagtggaagcacgggcggatcatcctgcccagctacgacatggagtaccagattgtgttcgagggagtgatagggaaaggacgttccggagagattgccattgatgacattcggataagcactgatgtcccactggagaactgcatggaacccatctcggcttttgcagtggacatcccagaaatacatgagagagaaggatatgaagatgaaattgatgatgaatacgaggtggactggagcaattcttcttctgcaacctcagggtctggcgccccctcgaccgacaaagaaaagagctggctgtacaccctggatcccatcctcatcaccatcatcgccatgagctcactgggcgtcctcctgggggccacctgtgcaggcctcctgctctactgcacctgttcctactcgggcctgagctcccgaagctgcaccacactggagaactacaacttcgagctctacgatggccttaagcacaaggtcaagatgaaccaccaaaagtgctgctccgaggcatga

SEQ ID NO: 337 - DNA, 562 bp, Homo sapiens
ctggctgaattttatagattagttttgttttgttttaaatacctttaagcagcaaaatgtgtctaaaataggtctgttgccatattgtgaattctgtatcatcatttaatgaacttcaatgtccttacagaattaaatagtggcttcataaaatagatctaccaaaagctgccatttcagcatcttcatatactccttccacacatgcactcttaagttgatgccctgttgtgtttttttttaaagcaggacttgccttactatccaacctggcttcaaacatgttatcctccagtctcagactcctggatactagaatcatgcatgcactacactgccatgctagccttcatctgcctttgtttcagtatgtagcctaggctagccttgaacttagagcaatcctcttgcttctgcctcacaaatgctaaggatacaagtgtatgtcactatgcctgccttttaggcttacttcttgagtcaagcccagtgagcttgtctgtttcctgtccactacacattgatataaacatggtaagaactgctgactctgggacaattg

SEQ ID NO: 338 - DNA, 432 bp, Homo sapiens
gaccttctggaggacttcctagactatgaaggctataagtatgagcgcatccatcggtggtatcacgggcgccctcaggcaggcgcgcattgatcgcttcaatggtgaggaggaaatacggtcctatctagggacctggagggcctgagaacacctgccgtgtccttaggatgggagacggggcggggacctggaaacttagactagcagttagaatgtagtggttgatagagcatccagcaaccaggggtaaactcggcctcttacttctcacatcccagcccctggtgcccaacagttctgcttcctcctgtccacccgagctggtggcctgggcatcaacttggccactgctgacactgtcatcatcttcgattctgactggaacccccataatgacatccaggccttcagcagagcccatcggattgg

SEQ ID NO: 339 - DNA, 303 bp, Homo sapiens
ctgaagtgggcacgggagtcacaggacactgtgtgagtgctgggaactgagcttgtgttctctgaaaccactgaattctatctccagctcttattttatttttgacagaggagactgttacatttaactgaagctgcctttaaagttctgatctacttcagtggtctgaatgctggaattacacatatacacagccatcgctatccagaaataaaaacctgttttggttggggtttgtttgtttttttgagacaggttctctatacaaagtcctaactgttcaggaacagttatacatctgac

SEQ ID NO: 340 - DNA, 406 bp, Homo sapiens
cttccaagaaggtactatgggaatagttattgtctgctcaccttactcagcatggattctatgggctgagggtgaagccaaatggtagagtttccttcacttgtgtgaagccctaggatcgatccctagcactgaaaactagttcgtataacaaagattaaggaagaaaagtcaaaatttaaaaggtacatcctgaatactataaaaacttaattattttctataatcttctagaaggtcctggtatttttgtatattagaggtaattaggaggagacctaaaacaatgtttcaaaataaaaaaataagtttatactttggagatggtcaactaattacctagaaagcctttccttagtgttcattaattaggtcattgtttataacatcaagattttggaagcac

SEQ ID NO: 341 - DNA, 5861 bp, Homo sapiens
cggcgccgcgcggccgcgctagaatggaggcgcccagcggcagcgagcccggcggcgacggggccggggactgcgcccacccggacccccgggcccctggcgccgcggcgcccagctccggccccggcccgtgcgcggccgcccgggagtccgagcgccagctgcgcctccgcctctgcgtcctcaacgagatcttgggcaccgagagggactacgtgggcaccttgcgcttcttgcagtcggcattcctgcatcgcatccggcagaacgtggccgactcagtggagaagggcctcacggaggagaatgtcaaggtcctgttctcgaacatcgaagacatcctggaagttcataaggatttcttggccgccttggagtattgtttacacccggagccgcagtctcagcatgaacttgggaatgttttcttaaaattcaaggacaagttctgcgtgtacgaggagtattgcagcaaccatgagaaagccctgaggctgctggtggagctgaacaagatccctaccgtgcgcgccttccttttgagctgcatgcttctgggaggccggaagaccacggacatccctttggaaggctacctgttgtctccgatccagaggatctgcaagtacccgctcctccttaaggagctggccaagaggactcccggcaagcacccagaccaccccgcggtccagagtgccctgcaggccatgaagaccgtttgctccaacatcaatgagaccaagcggcagatggagaagctggaagccctggagcagctgcagtcccacatcgaaggctgggagggttccaacctcacagacatctgcactcagctcctcctgcaagggactttgttaaagatctctgcgggcaacatccaggaaagggccttcttcctcttcgacaaccttctcgtctactgcaagcggaaatccagggtcaccgggagcaagaagtccaccaagaggaccaaatccatcaacggctccctctacatcttcaggggtcgaatcaacactgaagtcatggaggtggagaatgtggaagatgggacagcggattaccatagcaatggctataccgtcaccaacggctggaagatccacaacacggccaagaataagtggtttgtctgcatggccaagacggcagaggagaagcagaagtggctggatgccatcatccgcgagcgggagcagcgcgagagcctgaagctgggcatggagcgtgatgcctacgtcatgattgcggagaagggggagaagctgtaccacatgatgatgaacaagaaggtgaacctcatcaaggaccgccggagaaagctgagcactgtccccaagtgctttcttggcaatgagttcgttgcctggctcctagaaattggtgaaatcagcaagacggaagaaggagtcaacttgggccaagccctgttggagaatggcatcatccaccatgtttccgacaagcaccagttcaagaatgagcaggtgatgtatcgcttccgctacgacgatggcacctacaaggcccgaagtgagctggaggacatcatgtccaagggtgtgaggctttactgccgtcttcacagcctctacaccccggtgatcaaagaccgtgattaccacctgaagacctacaagtcagtgcttcccgggagcaagctggtggactggctgctggctcagggagactgccagactcgggaggaggcagtggcgctcggcgtgggtctgtgcaacaatggcttcatgcaccacgtgctggagaagagcgagttcagggatgagtcccagtacttccgctttcatgctgacgaggagatggaggggaccagcagcaagaacaaacagcttcgcaacgacttcaagctggtggagaacattctggccaagcgcctgctgatcctgccccaggaggaggactatggctttgacatcgaggagaagaacaaggctgtggtggtgaagtccgtccagaggggctcgctggctgaggtggctggcctgcaggtggggaggaagatctactccatcaatgaggacctggtgttcctgcggccgttttcagaggtggagtccatcctcaaccagtccttctgctcccgccgccctctgcgcctcctggtggccacgaaggccaaagagatcatcaaaatccccgaccagccggacacactgtgcttccagattcgtggagctgccccaccgtacgtctatgctgtggggagaggctctgaggccatggctgcagggctctgtgctggtcagtgcattctgaaggtcaatggcagcaacgtgatgaacgatggtgcccctgaggtcctggagcacttccaggcattccggagtcggcgcgaagaggccctgggcctgtaccagtggatctaccacacccatgaggatgcccaggaagcacgagccagtcaggaggcctccactgaggaccccagtggcgagcaggcccaggaggaagaccaggctgattcagccttcccactgctgtccctgggtccccggctgagcctgtgtgaggacagccccatggtcaccctgactgtggacaacgtgcacctggaacacggcgtggtgtatgagtatgtgagcacggcaggcgtcaggtgccatgtgctggagaagatcgtggagccccgcggctgcttcggcctcaccgccaagatcctcgaggcctttgctgccaatgacagcgtcttcgtggagaactgcaggcggctcatggccctgagcagcgccatcgtgaccatgccccactttgagttccgcaacatctgtgacaccaagctggagagcattggccagaggattgcctgctaccaggagtttgcagcccaactgaagagcagggtcagcccacccttcaaacaagcccccctggagccccacccgctgtgtggcctggacttctgccccaccaattgccacatcaacctcatggaagtgtcctaccccaagaccaccccctcagtgggcaggtccttcagcatccgctttggacgcaaaccctccctcatcggccttgacccggagcaaggccacctgaaccccatgtcgtacacccagcactgcatcaccaccatggctgctccctcctggaagtgcttgcctgctgcagagggtgatccccaaggccagggtctccatgatggcagcttcgggccagccagtgggacccttggtcaggaagaccggggcctcagcttcctactcaagcaggaggaccgtgagatccaggatgcctacctgcagctcttcaccaagctggatgtggccctgaaggagatgaagcaatatgtcacccagatcaacaggctgctgtccaccatcacagagcccacctcgggtgggtcctgcgacacatccttggctgaggaggcctcctccctgcccctggtcagtgaagagagcgagatggacaggagtgaccatgggggcatcaagaaggtgtgcttcaaggtggccgaggaggaccaggaggactcaggccacgacaccatgagttatcgcgactcctacagcgagtgtaacagcaatcgagactcggtcctgtcctacaccagcgtgagaagtaacagctcctacttgggcagcgacgagatggggtctggagatgagctgccctgtgacatgcggatcccatctgacaagcaggacaagcttcatggctgcctggagcacctctttaaccaggtggactccatcaatgctctcctcaaggggccagtcatgagccgggctttcgaagagaccaagcatttccctatgaaccacagcttacaagagtttaaacagaaagaagagtgtacaatccgtggccggagcctgatccagattagcatccaggaggacccctggaacctccccaactccatcaagaccctggtggacaacattcagagatatgtggaagatgggaagaaccagctgctcctggccttgctgaagtgcacagacacggagctgcagctgcgcagagacgcgatcttctgccaggccctggtggccgccgtgtgcaccttctccgagcagctgctggcggccctgggctaccgctacaacaacaatggcgagtacgaggagagcagccgcgacgccagccgcaagtggctggagcaggtggcggccacgggcgtcctgctgcactgccagtccctgctctcgccagccacagtgaaggaggaacggaccatgctggaggacatctgggtgacgctgtcagagctggacaatgtcaccttctcctttaagcagctggacgagaactatgtggccaacaccaacgtcttctaccacattgagggcagccggcaggcgctgaaggtcatcttctacctcgacagctaccacttctccaagctgccctcccgcctggagggtggggccagcctgaggctgcacacagcgctgttcacgaaagtgctggagaacgtggaggggctgccttctccaggcagccaggccgcggaggatttgcagcaggacatcaacgcgcagtccctggagaaagttcagcagtattaccgcaaactcagggcattttacctggagcggtctaacctgcccacggatgccagcaccacggcggtaaagatagaccagctgatccgccccatcaatgccctggatgagctctgccgcctcatgaagtcctttgtccacccaaagcctggtgctgctgggagtgtgggcgccggcctcatccccatctcctcggagctctgctaccgcctgggggcctgccagatggtcatgtgtggcacaggcatgcagaggagcaccctgagcgtgtccctggagcaggcggccatcttggcacggagccacgggttgctgcccaagtgcatcatgcaggccacggacatcatgcggaagcagggcccaagggtggagattctggccaaaaacctgcgagtcaaggaccagatgccccagggtgctccgcgcctctaccgcctctgccagccgccggtggatggggacctctgaacacccaaatgccccacgctgggccgcggcctctggagctgggatttgggaggacacagcaggcagcgctggccttctccagggatggcccaaggcttccgcagccgcccgttccgggacctgcccagcgtcctccctgcctccttccgggacaagcctggccaccctcgctgtgatgacgagctggctgattggccctgggccggcccattcttcacacgcctgccagaagctggaggggtgctggagacccatagagctgatgggagcagctggtgcctggccttcggctcctgcgtccccagaacccaagggaacgtcatggaggccacatggggccacccggctccctcgggatggctccgcctgcacttttgaaaccccggtttccttcaacgtccacattccaggtgaccacacgtgtctcctcctcctcatcttagcttccaggttcaccctaaccctgtactaacctgcttggtggacttggaaaagacttggctctgtcgggaaaggagagacggggcctccatcacgcctgttaccagaggatccccgagagccacaccagctctggacatcaccgcccctggaactggggccaccagccctgggcacgagatttgctctgactttatttatatggcatgaaatctctggtttattttgggattttttgttgttggtgttgtcaaagtttgttttttctaaagttgtgtgattatatatttgacattttacatttcaaagaaaggtatgttgtctaacaggggaccaacagaaggtagtattgacaactgttcccgcttctactaaaaaaaaaagagcacaaaagaaaaactaaattattgaaaaatt

SEQ ID NO: 342 - DNA, 1614 bp, Homo sapiens
cttgtcggagccctaaccaggggtatctctgagcctggtgggatccccggagcgtcacatcactttccgatcacttcaaagtggttaaaaactaatatttatatgacagaagaaaaagatgtcattccgtaaagtaaacatcatcatcttggtcctggctgttgctctcttcttactggttttgcaccataacttcctcagcttgagcagtttgttaaggaatgaggttacagattcaggaattgtagggcctcaacctatagactttgtcccaaatgctctccgacatgcagtagatgggagacaagaggagattcctgtggtcatcgctgcatctgaagacaggcttgggggggccattgcagctataaacagcattcagcacaacactcgctccaatgtgattttctacattgttactctcaacaatacagcagaccatctccggtcctggctcaacagtgattccctgaaaagcatcagatacaaaattgtcaattttgaccctaaacttttggaaggaaaagtaaaggaggatcctgaccagggggaatccatgaaacctttaacctttgcaaggttctacttgccaattctggttcccagcgcaaagaaggccatatacatggatgatgatgtaattgtgcaaggtgatattcttgccctttacaatacagcactgaagccaggacatgcagctgcattttcagaagattgtgattcagcctctactaaagttgtcatccgtggagcaggaaaccagtacaattacattggctatcttgactataaaaaggaaagaattcgtaagctttccatgaaagccagcacttgctcatttaatcctggagtttttgttgcaaacctgacggaatggaaacgacagaatataactaaccaactggaaaaatggatgaaactcaatgtagaagagggactgtatagcagaaccctggctggtagcatcacaacacctcctctgcttatcgtattttatcaacagcactctaccatcgatcctatgtggaatgtccgccaccttggttccagtgctggaaaacgatattcacctcagtttgtaaaggctgccaagttactccattggaatggacatttgaagccatggggaaggactgcttcatatactgatgtttgggaaaaatggtatattccagacccaacaggcaaattcaacctaatccgaagatataccgagatctcaaacataaagtgaaacagaatttgaactgtaagcaagcatttctcaggaagtcctggaagatagcatgcgtgggaagtaacagttgctaggcttcaatgcctatcggtagcaagccatggaaaaagatgtgtcagctaggtaaagatgacaaactgccctgtctggcagtcagcttcccagacagactatagactataaatatgtctccatctgccttaccaagtgttttcttactacaatgctgaatgactggaaagaagaactgatatggctagttcagctagctggtacagataattcaaaactgctgttggttttaattttgtaacctgtggcctgatctgtaaataaaacttacatttttcaataaaaaaaaaaaaaaaaaaaaaaaa

SEQ ID NO: 343 - DNA, 2764 bp, Homo sapiens; identical to SEQ ID NO: 325

SEQ ID NO: 344 - DNA, 533 bp, Homo sapiens
tcccacctgaccccatgccgaacgagcgtccatctacttccacagcagtatttggcactgtttcagctaccccaagttcctccttgccaaagcgcactcgggaggaggaagaggacagcaccatggaagcaggagaccaagtctctgaggacacagtggaaatgcctctcccgaagaagctgaagatggtcacacccgttggaaccgaggaagaagttatggcagaagaaagtactgatggagaggcagaaactcaagcctataatcaggactctcaagattccattggagaaggagttacccagggagattatacaccaatggaagacagtgaagaaacatcacaatctctacaaatcgatcttggaccacttcagtcagatcaacagactacttcctctcaagatggtcaaggcaaaggagatgatgtaattgtaattgacagtgatgatgaagatgatgatgaagaaaatgatggcgaacatgaagattatgaagaagacgaagatgatgatgatgatgaagaagatgac

SEQ ID NO: 345 - DNA, 473 bp, Homo sapiens
aggcacagacaccaaggacagagacgctggctaggccgccctccccactgttaccaacatgaagctgctcgcagcaactgtgctactcctcaccatctgcagccttgaaggagctttggttcggagacaggcaaaggagccatgtgtggagagcctggtttctcagtacttccagaccgtgactgactatggcaaggacctgatggagaaggtcaagagcccagagcttcaggccgaggccaagtcttactttgaaaagtcaaaggagcagctgacacccctgatcaagaaggctggaacggaactggttaacttcttgagctatttcgtggaacttggaacacagcctgccacccagtgaagtgtccagaccattgtcttccaaccccagctggcctctagaacacccactggccagtcctagagctcctgtccctacccactctttgctacaataaatgctgaatgaatcc

SEQ ID NO: 346 - DNA, 2645 bp, Homo sapiens
gcggccgccatggcggagaattggaagaactgcttcgaggaggagctcatctgccctatctgcctgcacgttttcgtggagccagtgcagctgccgtgcaaacacaacttctgccggggctgcatcggcgaggcgtgggccaaggacagcggcctcgtacgctgcccagagtgcaaccaggcctacaaccagaagccgggcctggagaagaacctgaagctcaccaacatcgtggagaagttcaatgccctgcacgtggagaagccgccggcggcgctgcactgcgtgttctgccgccgcggccccccgctgcccgcgcagaaggtctgcctgcgctgcgaggcgccctgctgccagtcccacgtgcagacgcacctgcagcagccctccaccgcccgcgggcacctcctggtggaggcggacgacgtgcgggcctggagctgcccgcagcacaacgcctaccgcctctaccactgcgaggccgagcaggtggccgtgtgccagtactgctgctactacagcggcgcgcgtcagggacactcggtgtgcgacgtggagatccgaaggaatgaaatccggaagatgctcatgaagcagcaggaccggctggaggagcgagagcaggacattgaggaccagctgtacaaactcgagtcagacaagcgcctggtggaggagaaagtgaaccaactgaaggaggaagttcggctgcagtacgagaagctgcaccagctgctggacgaggacctgcggcagacagtggaggtcctagacaaggcccaggccaagttctgcagcgagaacgcagcgcaggcgctgcacctcggggagcgcatgcaggaggccaagaagctgctgggctccctgcagctgctctttgataagacggaggatgtcagcttcatgaagaacaccaagtctgtgaaaatcctgatggacaggacccagacctgcacgagcagcagcctttcccccactaagatcggccacctgaactccaagctcttcctgaacgaagtggccaagaaggagaagcagctgcggaaaatgctagaaggccccttcagcacgccggtgcccttcctgcagagtgtccccctgtacccttgcggcgtgagcagctctggggcggaaaagcgcaagcactcaacggccttcccagaggccagtttcctagagacgtcgtcgggccctgtgggcggccagtacggggcggcgggcacagccagcggtgagggccagtctgggcagcccctggggccctgcagctccacgcagcacttggtggccctgccgggcggcgcccaaccagtgcactcaagccccgtgttccccccatcgcagtatcccaatggctccgccgcccagcagcccatgctcccccagtatggcggccgcaagattctcgtctgttctgtggacaactgttactgttcttccgtggccaaccatggcggccaccagccctacccccgctccggccactttccctggacagtgccctcgcaggagtactcacacccgctcccgcccacaccctccgtcccccagtcccttcccagcctggcggtcagagactggcttgacgcctcccagcagcccggccaccaggatttctacagggtgtatgggcagccgtccaccaaacactacgtgacgagctaacgccacgcaggcggcggggcgctggggaatcttcctccccagcccccgggctcgggagttatgcatccagagacctgcccttctaccttcctcgcctcccctcttcctcattccattgccccaggtcttttccttttggattttgttttggttttggctttgtttttgatttttttttattatgaatctcctggacgcagaggtgacagtgggagctggcctgggccaggacggcaggtggccctggagatgggaaagtgtctgtgtcgaggcgctgagctctctctctgtttctccttttttcctctactccttccccttcacacccccgtggctggaaggaacctcggcttccctgaaagcttgggggtcccacccttcttaccccacccgggaggaacgcccagggccccgggcttgtttctcctcttgttttccttttgggcagtttgatcactgatcgagtaaggaatgacctttagattgtgcgacttttgtttttgtttttttaaatttttttaaaccaagaatgatttctcctgcttccttctcctcaccatcttcccagacggagttcaaaggccacttctcaagcagcttttggcaccttcagcctcagagtggaatcttttaaagacaggacccctatgtccaggaaaggggaaaaggaactttgccaatgatagtgaccacagcaaaagcaaataataataatattaataataataaagagaaataaaataataaaataaaaaacaatagcacagcccttgttgaggtcagcagggaggaggggctgcccggagttgggtccttgcctggattttgacacagcaacttcctgtagtgagcactttgtatgaatcgtggacttcctgttctcaaggcgcaggtatttattctgtatctgtctagcgcacacaccaaaatccaaccttctaataaacatgatggcgcagtcccaaaaaaaaaaaaaaaaa

SEQ ID NO: 347 - DNA, 1451 bp, Homo sapiens
aggggcgctccggccagtgattggctggaggtttgttaactattcatgagggggcgggccgagcggggcggcctttgttaagcagcgagggcgcgaccgcgggtactctgctgccggcttctcggagcggcgctgggcgaccagagcagggtcgagatgtcctacatcccgggccagccggtcaccgccgtggtgcaaagagttgaaattcacaagctgcgtcaaggtgagaacttaatcctgggtttcagcattggaggtggaatcgaccaggacccttcccagaatcccttctctgaagacaagacggacaagggtatttatgtcacacgggtgtctgaaggaggccctgctgaaatcgctgggctgcagattggagacaagatcatgcaggtgaacggctgggacatgaccatggtcacacacgaccaggcccgcaagcggctcaccaagcgctcggaggaggtggtgcgtctgctggtgacgcggcagtcgctgcagaaggccgtgcagcagtccatgctgtcctagcagccaccaccatctgcgactcctgcctgccgcctctctgtacagtaacgccacttccacactctgtccccatctggcttctgctgaccgctgggccccagctcagaagggctatagctggtcccagaggcctggcctggccttccttcccttctcccatccctggcctggggcctctgggaccagctttctctcctggacaccgaggattggaaataagggcctggagctgagtagtagccagtctgctgtgaccacaggctcaggtccgaccctgctgcttggccacagcagtggctgggcaagtgggaaccactatctcttgggagcccccaaaagctgggaaatgctggaggaaccaggcctttcccgcttttgcctggctgcagggttcggctccgcccctgccccccagccctcgtgtgtccacaccgcagtgcctctgcccctcgggggactggacacacatcctgccagaggcgctacgaagctttgcccagatgaagccaggtgggctccgcgttcactcccactctcccgaggggtgctggcctccccagggtttgccttcttacggatttagacgaggttcgaggctcacctatcagggcagctctcaggattgtcattttcctctttgcctgtgggtttaacttttgtatttttttaatcacaagtttgatacaaaatgtttttatcgtactctttggagatgcccattctacttttgaatttagcttttactaattcgcatctggaagctcagcaagtgcacaagccttactttggttaccgtggaaaccactgccgcccctccccgatgtggtgcgctcaataaaaatgctggaattcaaaaaaaaaaaaaaaaaaaaaaaaaaaaaaaaaaaaaaaaaaaaaaaaaaaaaaaaaaaaaaaaaaaa

SEQ ID NO: 348 - DNA, 466 bp, Homo sapiens
cttatcgtagagcttaatagctgtcttgactttgagtgcagtgagcaaagatgaaggacagggtaggaaaggaacctcaaggggaaaggacctaggagcgaaggtcacatctgaacagactgccagcaatagccttccctttcggttgtttggatttattcctatcgtaccatgagcccacaaatggctcccggtttaaagctctcttctctcagcaggtctgaaacaatcggagaaagaacccaactgcaagccatctcgctgggccagctcagttggagagggctaatcgctctgtttatatttatgttttccaatatcccagtaaatccatgtatatgctcactatatttaataaccacaactagagatgttcatggtcaaagtactgcctttgcagaggagcctgtttctaaagaaaccatgctgtgaagtaaactcgctactgtcatatgaacagtgacac

SEQ ID NO: 349 - DNA, 493 bp, Homo sapiens
tcttgtttctgcagtctaattagcagctctacaattaaacatttagaatgctgtgaatgtttcctatgtaaagatgtttagaattggtttgtattgtttgtgtcttgtaccttgtgtggattaagctgattgaaatgagattttgatccaagtgttcagaatagaatacacaatgatgggaaattgtataggttagaaagcttttctgctttttcaaaaattaaaaaacccagcagttgcttttcagctgtgccactcttcaccacaggtaacaagagctataaatgagtctccggttgtagagactttaacatatgacaccataggataatgactgactagcaattctagtcacttaaccattactgactagaagttaactaagccatcttaaaatgcgcccagggacaggcgcaggcacacatacttctgcatgcaagagcaaaatgaattcaagttgtcttgcttactaatttcagatgtcacagtgtag

SEQ ID NO: 350 - DNA, 712 bp, Homo sapiens; identical to SEQ ID NO: 301
  misc_feature 205: n = A,T,C or G

SEQ ID NO: 351 - DNA, 1502 bp, Homo sapiens
cctgcgtccccgccccgcgcagccgccgcgctcctgcgctccgaggtccgaggttcccgagatgaaggtctggctgctgcttggtcttctgctggtgcacgaagcgctggaggatgttactggccaacaccttcccaagaacaagcgtccaaaagaaccaggagagaatagaatcaaacctaccaacaagaaggtgaagcccaaaattcctaaaatgaaggacagggactcagccaattcagcaccaaagacgcagtctatcatgatgcaagtgctggataaaggtcgcttccagaaacccgccgctaccctgagtctgctggcggggcaaactgtagagcttcgatgtaaagggagtagaattgggtggagctaccctgcgtatctggacacctttaaggattctcgcctcagcgtcaagcagaatgagcgctacggccagttgactctggtcaactccacctcggcagacacaggtgaattcagctgctgggtgcagctctgcagcggctacatctgcaggaaggacgaggccaaaacgggctccacctacatcttttttacagagaaaggagaactctttgtaccttctcccagctacttcgatgttgtctacttgaacccggacagacaggctgtggttccttgtcgggtgaccgtgctgtcggccaaagtcacgctccacagggaattcccagccaaggagatcccagccaatggaacggacattgtttatgacatgaagcggggctttgtgtatctgcaacctcattccgagcaccagggtgtggtttactgcagggcggaggccgggggcagatctcagatctccgtcaagtaccagctgctctacgtggcggttcccagtggccctccctcaacaaccatcttggcttcttcaaacaaagtgaaaagtggggacgacatcagtgtgctctgcactgtcctgggggagcccgatgtggaggtggagttcacctggatcttcccagggcagaaggatgaaaggcctgtgacgatccaagacacttggaggttgatccacagaggactgggacacaccacgagaatctcccagagtgtcattacagtggaagacttcgagacgattgatgcaggatattacatttgcactgctcagaatcttcaaggacagaccacagtagctaccactgttgagttttcctgacttggaaaaggaaatgtaatgaacttatggaaagcccatttgtgtacacagtcagctttggggttccttttattagtgctttgccagaggctgatgtcaagcaccacaccccaaccccagcgtctcgtgagtccgacccagacatccaaactaaaaggaagtcatccagtctattcacagaagtgttaacttttctaacagaaagcatgattttgattgcttacctacatacgtgttcctagtttttatacatgtgtaaacaattttatataatcaatcatttctattaaatgagcacgtttttgtaaaaaat

SEQ ID NO: 352 - DNA, 380 bp, Homo sapiens
tttttgttctcagctcccaggccgcactgaacacagtgttgctgccttcagtttggttctggccatgaggcccctagtgggagctttgccttagggtgtcctctgacttgccctcaaagttcaccaattcggcaactccatggagacggtcgtgtcactctcagcccctgttgctattaagtcatgtcatgggcacccggaaaaggaaatacactgaggtgtattttacaattgctccttaagattctcagtggagattaggagcaacactgcacttctgatagaaaaatggccttggatcactaaactaggtagagaagggcacaccacaccccagcgccccaggagccaaaactcacgctcgggcagcagcagctgag

SEQ ID NO: 353 - DNA, 1502 bp, Homo sapiens; identical to SEQ ID NO: 351

SEQ ID NO: 354 - DNA, 4129 bp, Homo sapiens
gacgagcgctgcactaacgcaggatccggctgccgaaggtcctcgccagcaggatgaagttaaaggaagtagatcgtacagccatgcaggcatggagccctgcccagaatcaccccatttacctagcaacaggaacatctgctcagcaattggatgcaacatttagtacgaatgcttcccttgagatatttgaattagacctctctgatccatccttggatatgaaatcttgtgccacattctcctcttctcacaggtaccacaagttgatttgggggccttataaaatggattccaaaggagatgtctctggagttctgattgcaggtggtgaaaatggaaatattattctctatgatccttctaaaattatagctggagacaaggaagttgtgattgcccagaatgacaagcatactggcccagtgagagccttggatgtgaacattttccagactaatctggtagcttctggtgctaatgaatctgaaatctacatatgggatctaaataattttgcaaccccaatgacaccaggagccaaaacacagccgccagaagatatcagctgcattgcatggaacagacaagttcagcatattttagcatcagccagtcccagtggccgggccactgtatgggatcttagaaaaaatgagccaatcatcaaagtcagtgaccatagtaacagaatgcattgttctgggttggcatggcatcctgatgttgctactcagatggtccttgcctccgaggatgaccggttaccagtgatccagatgtgggatcttcgatttgcttcctctccacttcgtgtcctggaaaaccatgccagggggattttggcaattgcttggagcatggcagatcctgaattgttactgagctgtggaaaagatgctaagattctctgctccaatccaaacacaggagaggtgttatatgaacttcccaccaacacacagtggtgcttcgatattcagtggtgtccccgaaatcctgctgtcttatcagctgcttcgtttgatgggcgtatcagtgtttattctatcatgggaggaagcacagatggtttaagacagaaacaagttgacaagctttcatcatcttttgggaatcttgatccctttggcacaggacagccccttcctccgttacaaattccacagcagactgctcagcatagtatagtgctgcctctgaagaagccgcccaagtggattcgaaggcctgttggtgcttctttttcatttggaggcaaactggttacgtttgagaatgtcagaatgccttctcatcagggagctgagcagcagcagcagcagcaccatgtgttcattagtcaggttgtaacagaaaaggagttcctcagccgatcagaccaacttcagcaggctgtgcagtcacaaggatttatcaattattgccaaaaaaaaattgatgcttctcagactgaatttgagaaaaatgtgtggtcctttttgaaggtaaactttgaggatgattctcgtggaaaataccttgaacttctaggatacagaaaagaagatctaggaaagaagattgctttggccttgaacaaagtggatggagccaatgtggctcttaaagactctgaccaagtagcacagagtgatggggaggagagccctgctgctgaagagcagctcttgggagagcacattaaagaggaaaaagaagaatctgaatttctaccctcatctggaggaacatttaatatctctgtcagtggggacattgatggtttaattactcaggctttgctgacgggcaattttgagagtgctgttgacctttgtttacatgataaccgcatggccgatgccattatattggccatagcaggtggacaagaactcttggctcgaacccagaaaaaatacttcgcaaaatcccaaagcaaaattaccaggctcatcactgcagtggtgatgaagaactggaaagagattgttgagtcttgtgatcttaaaaattggagagaggctttagctgcagtattgacttatgcaaagccggatgaattttcagccctttgtgatcttttgggaaccaggcttgaaaatgaaggagatagcctcctgcagactcaagcatgtctctgctatatttgtgcagggaatgtagagaaattagttgcatgttggactaaagctcaagatggaagccaccctttgtcacttcaggatctgattgagaaagttgtcatcctgcgaaaagctgtgcaactcactcaagccatggacactagtactgtaggagttctcttggctgcgaagatgagtcagtatgccaatttgttggcagctcagggcagtattgctgcagccttggcttttcttcctgacaacaccaaccagccaaatatcatgcagcttcgtgacagactttgtagagcacaaggagagcctgtagcaggacatgaatcacctaaaattccgtacgagaaacagcagctccccaagggcaggcctggaccagttgctggccaccaccagatgccaagagttcaaactcaacaatattatccccatggagaaaatcctccacctccgggtttcataatgcatggaaatgttaatccaaatgcttctggtcagcttcccacatctccaggtcatatgcacacccaggtaccaccttatccacagccacagccttatcaaccagcccagccgtatcccttcggaacaggggggtcagcaatgtatcgacctcagcagcctgttgctcctcctacttcaaacgcttaccctaacaccccttacatatcttctgcttcttcctatactgggcagtctcagctgtacgcagcacagcaccaggcctcttcacctacctccagccctgctacttctttccctcctcccccttcctctggagcatccttccagcatggcggaccaggagctccaccatcatcttcagcttatgcactgcctcctggaacaacaggtacactgcctgctgccagtgagctgcctgcgtcccaaagaacaggtcctcagaatggttggaatgaccctccagctttgaacagagtacccaaaaagaagaagatgcctgaaaacttcatgcctcctgttcccatcacatcaccaatcatgaacccgttgggtgacccccagtcacaaatgctgcagcaacagccttcagctccagtaccactgtcaagccagtcttcattcccacagccacatcttccaggtggccagcccttccatggcgtacagcaacctcttggtcaaacaggcatgccaccatctttttcaaagcccaatattgaaggtgccccaggggctcctattggaaataccttccagcatgtgcagtctttgccaacaaaaaaaattaccaagaaacctattccagatgagcacctcattctaaagaccacatttgaggatcttattcagcgctgcctttcttcagcaacagaccctcaaaccaagaggaagctagatgatgccagcaaacgtttggagtttctgtatgataaacttagggaacagacactttcaccaacaatcaccagtggtttacacaacattgcaaggagcattgaaactcgaaactactcagaaggattgaccatgcatacccacatagttagcaccagcaacttcagtgagacctctgctttcatgccagttctcaaagttgttctcacccaggccaataagctgggtgtctaaaaggacagcttctcttccactcaatattgccatttttccaaagaaacatgttaaaaaaaaaaattataagacatggactagtcctcattagcatgtttgcatagcaaccagtcaagagcatttacactatttctgctgatatactcaccttagaactgctcagaaccctggtgctttatttttgttttaatcttttgttgccagtgatgattttcctattctgcaaatagtgtatttcctggattacacatagtatggtttcctgaagtattctgataaatgtgtttttttaaaacctcaatatactttttagaaaaggagcatctggttatgcataaagcagagctaaaactaaatttctttcatgtcctccctacttcctcagtgtcaatcagattaaagtgtgtaatcct

SEQ ID NO: 355 - DNA, 375 bp, Homo sapiens
ggaaacccccacagtgacaactcctcctgttattgcatctgccattatctctgaaacccaagaagtacgatccaaaaaagcaaaagaccaaacaaaggggtctctgaagaacaggaaaggcccaaccatcacccccaggcagatttctggctatagcacatactcagttccaacaacaacctgatactcccttggctttcagtcattccccgggaaaagtcactggtaggactgtaagtacagctgctcctcactcagcagcttctctcctgggcataactgaactgccccagaaatgcactcatacttcgggaaatataacagcttcggaaacaactctgttgagcaaatcacaggagagcaccgcaatgaaaa

SEQ ID NO: 356 - DNA, 2342 bp, Homo sapiens; identical to SEQ ID NO: 314

SEQ ID NO: 357 - DNA, 2232 bp, Homo sapiens
cgtggcactcacccggctcgcgcggccccggccgcccacgccgcgcgtcgttctcccgcccgctcgctccccggcgctcacacctgagctcactcgcgcacgcccgcccggcccgagaaccgcgccgccgcctcggccccgcggaagccccgccgcgccatgtcttcgcctcccgaagggaaactagagactaaagctggacacccgcccgccgtgaaagctggtggaatgcgaattgtgcagaaacacccacatacaggagacaccaaagaagagaaagacaaggatgaccaggaatgggaaagccccagtccacctaaacccactgtgttcatctctggggtcatcgcccggggtgacaaagatttccccccggcggctgcgcaggtggctcaccagaagccgcatgcctccatggacaagcatccttccccaagaacccagcacatccagcagccacgcaagtgagcctggagtccaccagcctgccccatggccccggctctgctgcacttggtatttccctgacagagagaaccagcagtttcgcccaaatcctactctgctgggaaatctaaggcaaaaccaagtgctctgtcctttgccttacatttccatatttaaaactagaaacagcttcagcccaaaccttgtttatggggagtctggttggatgtcatttgaggatcattgtgcccctagaggtgccattagcagaatttgccaagatccgagaaaaattttagctttagttctatttcagcagtcacctgacgtccttgtctatggtcttaaaaacaagaaggcacacatttgagaagatgagattaaggttaggagaaaacctcagtcattgcatgctttttagtatgggccaataaaatctcaacacctgtgggagagtaagaactaagggaatgagtttgggcgccccctcataaaggaccttagaggcagggaacagcaatgccaaatttccctctctcgtgagatgggggatcctgtgcaggctgatgaggcacccatgagaaaagccgaaaaagcatgcatcttagaaatagcccctcaattccaggagtcaacatgccaaagaatgaggctggagacaggtagctccgagggaggacttctggcatgagatctcggcacggcaagcccagcatcgcctcagcccagacaggctccaccaggagatcaagcaagggctgcctttcaggagtcacctcctgagccacttcagagttctggaagtgaccacggaccagggtggaggaatagacttctagttcattctgggacacttgagccagagagttgaaagcttggaaagaccagataagaaacctgccctttgtctccctagggacatgagacaccacattccatttgtgctagaaaaacctatccactgatgagtctaactgttccaaacgcctcccacctggtgtgcacagctgcctgggtccattgtcacttgggtgcatcaggttgtcctccgatttttagatgagtttcctgtctagagatgtcctagtctgctcactggctggtggcagtagggtaccctgcgtcctcgaaaagccagagggttcacctagtcagacgaaactccagaacagtgcttgtggagggcctgactgtcctgctcacccacagccgatctgctgcaggtcagcaactgtgtcgtgagcagctgccaaccaccagcctttctggtgctgttctccagttcacgtctgccagctggtgagggcagaggcagacctggtcagacccagcgcccctcctccctgagggagcatggcacagcctcacacttgaaagacggtgtttggtttcccatctaatcaacttaagggaagccggcatgtacccttcaaggccctgtcaccacctattttcctgatcagttggtataaactgagggtggcttttagagacccagacttggttggcagcgctgccatggaacaccccagcaagcacctcccagcctgcctttcggagcagcacccaggaggggatgccgcgctccagcaacaccaggtcaggcctgtgcagacccctgccctgccgctgcagaaatccagaagcatccttaatgcttctcagtcttcagccagagggagggctgttatttccagaggtgcgctttttatgtacttttagctagatgtggcatgcatctgtgagctttagatcattaaatccaaaatgtttgcctaaatgagg

SEQ ID NO: 358 - DNA, 440 bp, Homo sapiens
cttcgtcaagttctatgctccgtggtgtggccactgtaagaatctggctcctacctgggaggagctctctaaaaaggaattcccaggcttgtcagatgtcaccatcgcagaagtggactgcaccgctgagcgcaatgtctgcagcaagtactcggtacgaggttatcccacgttgctgcttttccgaggaggtgaaaaagtgggagaacacaacggaggtagagacctcgactccttacacagctttgttctgcgccaggcaaaggatgaactataggagaccccggggaagtcatccagcctgggcttaggcgtgacctcacacagacacacgtgttttcactgtggttagtcagaaagctgaatgtattgagcttgtgttgcttcctgtgtgctctctgagccaccacacactacggaccttaagttctctaatcatg

SEQ ID NO: 359 - DNA, 4294 bp, Homo sapiens
cgccagtatgttggagttggtggtggcttaagttttgaagggaggtagcatccgttggatatccacaccatccttctcgctgcaggctttcttggactccgtactgttggtgtaaccaaggcctggaggtctgggtggctcaggtttcctgcagccatgtttctgtacaacttaaccttgcagagagccactggcatcagctttgccattcatggaaacttttctggaaccaaacaacaagaaattgttgtttcccgtgggaagatcttggagctgcttcgcccagaccccaacactggcaaagtacataccctactcactgtggaagtattcggtgttatccggtcactcatggcctttaggctgacaggtggcaccaaagactacattgtagttggcagtgactctggtcgaattgttattttggaataccagccatctaagaatatgtttgagaagattcaccaagaaacctttggcaagagtggatgccgtcgcatcgttcctggccagttcttagctgtggatcccaaagggcgagccgttatgattagtgccattgagaaacagaaattggtgtatattttgaacagagatgctgcagcccgacttaccatttcatctcccctggaagcccacaaagcaaacactttagtgtatcatgtagttggagtagatgtcggatttgaaaatccaatgtttgcttgtctggaaatggattatgaggaagcagacaatgatccaacaggggaagcagcagctaatacccagcagacacttactttctatgagctagaccttggtttaaatcatgtggtccgaaaatacagtgaacctttggaggaacacggcaacttccttattacagttcctggagggtcagatggtccaagtggagtactgatctgctctgaaaactatattacttacaagaactttggtgaccagccagatatccgctgtccaattcccaggaggcggaatgacctggatgaccctgaaagaggaatgatttttgtctgctctgcaacccataaaaccaaatcgatgttcttctttttggctcaaactgagcagggagatatctttaagatcactttggagacagatgaagatatggttactgagatccggctcaaatattttgatactgtacccgttgctgctgccatgtgtgtgcttaaaacagggttcctttttgtagcatcagaatttggaaaccattacttatatcaaattgcacatcttggagatgatgatgaagaacctgagttttcatcagccatgcctctggaagaaggagacacattcttttttcagccaagaccacttaaaaaccttgtgctggttgatgagttggacagcctctctcccattctgttttgccagatagctgatctggccaatgaagatactccacagttgtatgtggcctgtggtaggggaccccgatcatctctgagagtcctaagacatggacttgaggtgtcagaaatggctgtttctgagctacctggtaaccccaacgctgtctggacagtgcgtcgacacattgaagatgagtttgatgcctacatcattgtgtctttcgtgaatgccaccctagtgttgtccattggagaaactgtagaagaagtgactgactctgggttcctggggaccaccccgaccttgtcctgctccttattaggagatgatgccttggtgcaggtctatccagatggcattcggcacatacgagcagacaagagagtcaatgagtggaagacccctggaaagaaaacaattgtgaagtgtgcagtgaaccagcgacaagtggtgattgccctgacaggaggagagctggtctatttcgagatggatccttcaggacagctgaatgagtacacagaacggaaggagatgtcagcagatgtggtgtgcatgagtctggccaatgtaccccctggagagcagcggtctcgcttcctggctgtggggcttgtggacaacactgtcagaatcatctccctggatccctcagactgtttgcaacctctaagcatgcaggctctcccagcccagcctgagtccttgtgtatcgtggaaatgggtgggactgagaagcaggatgagctgggtgagaggggctcgattggcttcctatacctgaatattgggctacagaacggtgtgctgctgaggactgtcttggaccctgtcactggggatttgtctgatactcgcactcggtacctggggtcccgtcctgtgaagctcttccgagtccgaatgcaaggccaggaggcagtattggccatgtcaagccgctcatggttgagctattcttaccaatctcgcttccatctcaccccactgtcttacgagacactggaatttgcatcgggttttgcctcggaacagtgtcccgagggcattgtggccatctccaccaacaccctacggattttggcattagagaagctcggtgctgtcttcaatcaagtagccttcccactgcagtacacacccaggaaatttgtcatccaccctgagagtaacaaccttattatcattgaaacggaccacaatgcctacactgaggccacgaaagctcagagaaagcagcagatggcagaggaaatggtggaagcagcaggggaggatgagcgggagctggccgcagagatggcagcagcattcctcaatgaaaacctccctgaatccatctttggagctcccaaggctggcaatgggcagtgggcctctgtgatccgagtgatgaatcccattcaagggaacacactggaccttgtccagctggaacagaatgaggcagcttttagtgtggctgtgtgcaggttttccaacactggtgaagactggtatgtgctggtgggtgtggccaaggacctgatactaaacccccgatctgtggcagggggcttcgtctatacttacaagcttgtgaacaatggggaaaaactggagtttttgcacaagactcctgtggaagaggtccctgctgctattgccccattccaggggagggtgttgattggtgtggggaagctgttgcgtgtctatgacctgggaaagaagaagttactccgaaaatgtgagaataagcatattgccaattatatctctgggatccagactattggacatagggtaattgtatctgatgtccaagaaagtttcatctgggttcgctacaagcgtaatgaaaaccagcttatcatctttgctgatgatacctacccccgatgggtcactacagccagcctcctggactatgacactgtggctggggcagacaagtttggcaacatatgtgtggtgaggctcccacctaacaccaatgatgaagtagatgaggatcctacaggaaacaaagccctgtgggaccgtggcttgctcaatggggcctcccagaaggcagaggtgatcatgaactaccatgtcggggagacggtgctgtccttgcagaagaccacgctgatccctggaggctcagaatcacttgtctataccaccttgtctggaggaattggcatccttgtgccattcacgtcccatgaggaccatgacttcttccagcatgtggaaatgcacctgcggtctgaacatccccctctctgtgggcgggaccacctcagctttcgctcctactacttccctgtgaagaatgtgattgatggagacctctgtgagcagttcaattccatggaacccaacaaacaaaagaacgtctctgaagaactggaccgaaccccacccgaagtgtccaagaaactcgaggatatccggacccgctacgccttctgagccctcctttcccggtggggcttgccagagactgtgtgttttgtttcccccaccaccatcactgccacctggcttctgccatgtggcaggagggtgactggataattaagactgcattatgaaagtcaacagctctttcccctcagctcttctcctggaatgactggcttcccctcaaattggcactgagatttgctacacttctccccacctggtacatgatacatgaccccaggttccagtgtagaacctgagtcccccattccccaaagccatccctgcattgatatgtcttgactctcctgtctacttttgcacacacccttaatttttaattggttttcttgtaaatacagttttgtacaatgttatctctgtgggaggaaggaggcaggctgtggtgggactgggtagggtatagtatcactcctgagttccactgctctagaatctaaccagaaatagaaacctagtttttaaggtg

SEQ ID NO: 360 - DNA, 1812 bp, Homo sapiens
tagctaggcaggaagtcggcgcgggcggcgcggacagtatctgtgggtacccggagcacggagatctcgccggctttacgttcacctcggtgtctgcagcaccctccgcttcctctcctaggcgacgagacccagtggctagaagttcaccatgtctattctcaagatccatgccagggagatctttgactctcgcgggaatcccactgttgaggttgatctcttcacctcaaaaggtctcttcagagctgctgtgcccagtggtgcttcaactggtatctatgaggccctagagctccgggacaatgataagactcgctatatggggaagggtgtctcaaaggctgttgagcacatcaataaaactattgcgcctgccctggttagcaagaaactgaacgtcacagaacaagagaagattgacaaactgatgatcgagatggatggaacagaaaataaatctaagtttggtgcgaacgccattctgggggtgtcccttgccgtctgcaaagctggtgccgttgagaagggggtccccctgtaccgccacatcgctgacttggctggcaactctgaagtcatcctgccagtcccggcgttcaatgtcatcaatggcggttctcatgctggcaacaagctggccatgcaggagttcatgatcctcccagtcggtgcagcaaacttcagggaagccatgcgcattggagcagaggtttaccacaacctgaagaatgtcatcaaggagaaatatgggaaagatgccaccaatgtgggggatgaaggcgggtttgctcccaacatcctggagaataaagaaggcctggagctgctgaagactgctattgggaaagctggctacactgataaggtggtcatcggcatggacgtagcggcctccgagttcttcaggtctgggaagtatgacctggacttcaagtctcccgatgaccccagcaggtacatctcgcctgaccagctggctgacctgtacaagtccttcatcaaggactacccagtggtgtctatcgaagatccctttgaccaggatgactggggagcttggcagaagttcacagccagtgcaggaatccaggtagtgggggatgatctcacagtgaccaacccaaagaggatcgccaaggccgtgaacgagaagtcctgcaactgcctcctgctcaaagtcaaccagattggctccgtgaccgagtctcttcaggcgtgcaagctggcccaggccaatggttggggcgtcatggtgtctcatcgttcgggggagactgaagataccttcatcgctgacctggttgtggggctgtgcactgggcagatcaagactggtgccccttgccgatctgagcgcttggccaagtacaaccagctcctcagaattgaagaggagctgggcagcaaggctaagtttgccggcaggaacttcagaaaccccttggccaagtaagctgtgggcaggcaagcccttcggtcacctgttggctacacagacccctcccctcgtgtcagctcaggcagctcgaggcccccgaccaacacttgcaggggtccctgctagttagcgccccaccgccgtggagttcgtaccgcttccttagaacttctacagaagccaagctccctggagccctgttggcagctctagctttgcagtcgtgtaattggcccaagtcattgtttttctcgcctcactttccaccaagtgtctagagtcatgtgagcctcgtgtcatctccggggtggccacaggctagatccccggtggttttgtgctcaaaataaaaagcctcagtgacccatgag

SEQ ID NO: 361 - DNA, 382 bp, Homo sapiens
gttgagaactgttttgtatttaaataggtatgctcatttcaacattctttattaataaaatgtatttcaatgtcaaaaagtatcactgttttcttcatttcattttgatgactcttctttgtcaatcagttcaaggacagttgtaccagattttggagagggtctgccctgaacgtgtggtaattgctcttgctgttcttgtaggcacatcaatgttatagtattgatctaaataaaagagaaaacatccttttaattaaaaagaaagtaaaacatttaagtttgtattgagtgttgtattcaaagtcaggatcatttcaatatcaaaagtggatgtcattaactttctgacaaaaaataatttagaatgatggaaggaata

SEQ ID NO: 362 - DNA, 456 bp, Homo sapiens
gcaagtcgacgtgtgcagaagtccttatagtctaggcccagttccccagtagcagctctgtcctgctagagaagagtggcccagctacttccagcactcttgatcttttgagcgcgacataaatcgaggtgcaagaagagaggaaaatctccaggtacctacaggattaattcattaagaaaataatcaacatgcaaaagtcttgtgacgagaacgaaggaacaccccagaacacaccaaaagcagacgaaggccatccttcagaagatccaccacagcaggcaggagaaactcttcaggcttctggagaaaatgtgagggaggaaactgaagggagccatagaggagagcctgctgaacccagcccagagcccaaagaggacactcccgcaaggcatctgaaccccgaagaagtgataagaggcgtagatgagttggaaaggcttagggaagaga

SEQ ID NO: 363 - protein, 129 aa, Homo sapiens
MGRRDAQLLAALLVLGLCALAGSEKPSPCQCSRLSPHNRTNCGFPGITSDQCFDNGCCFDSSVTGVPWCFHPLPKQESDQCVMEVSDRRNCGYPGISPEECASRKCCFSNFIFEVPWCFFPKSVEDCHY

SEQ ID NO: 364 - protein, 91 aa, Homo sapiens
MKLAVTLTLVTLALCCSSASAEICPSFQRVIETLLMDTPSSYEAAMELFSPDQDMREAGAQLKKLVDTLPQKPRESIIKLMEKIAQSSLCN

SEQ ID NO: 365 - protein, 256 aa, Homo sapiens
MFQTGGLIVFYGLLAQTMAQFGGLPVPLDQTLPLNVNPALPLSPTGLAGSLTNALSNGLLSGGLLGILENLPLLDILKPGGGTSGGLLGGLLGKVTSVIPGLNNIIDIKVTDPQLLELGLVQSPDGHRLYVTIPLGIKLQVNTPLVGASLLRLAVKLDITAEILAVRDKQERIHLVLGDCTHSPGSLQISLLDGLGPLPIQGLLDSLTGILNKVLPELVQGNVCPLVNEVLRGLDITLVHDIVNMLIHGLQFVIKV

SEQ ID NO: 366 - protein, 280 aa, Homo sapiens
MAEKFDCHYCRDPLQGKKYVQKDGHHCCLKCFDKFCANTCVECRKPIGADSKEVHYKNRFWHDTCFRCAKCLHPLANETFVAKDNKILCNKCTTREDSPKCKGCFKAIVAGDQNVEYKGTVWHKDCFTCSNCKQVIGTGSFFPKGEDFYCVTCHETKFAKHCVKCNKAITSGGITYQDQPWHADCFVCVTCSKKLAGQRFTAVEDQYYCVDCYKNFVAKKCAGCKNPITGFGKGSSVVAYEGQSWHDYCFHCKKCSVNLANKRFVFHQEQVYCPDCAKKL

SEQ ID NO: 367 - protein, 620 aa, Homo sapiens
MLSAIYTVLAGLLFLPLLVNLCCPYFFQDIGYFLKVAAVGRRVRSYGQRRPARTILRAFLEKARQTPHKPFLLFRDETLTYAQVDRRSNQVARALHDHLGLRQGDCVALLMGNEPAYVWLWLGLVKLGCAMACLNYNIRAKSLLHCFQCCGAKVLLVSPELQAAVEEILPSLKKDDVSIYYVSRTSNTDGIDSFLDKVDEVSTEPIPESWRSEVTFSTPALYIYTSGTTGLPKAAMITHQRIWYGTGLTFVSGLKADDVIYITLPFYHSAALLIGIHGCIVAGATLALRTKFSASQFWDDCRKYNVTVIQYIGELLRYLCNSPQKPNDRDHKVRLALGNGLRGDVWRQFVKRFGDICIYEFYAATEGNIGFMNYARKVGAVGRVNYLQKKIITYDLIKYDVEKDEPVRDENGYCVRVPKGEVGLLVCKITQLTPFNGYAGAKAQTEKKKLRDVFKKGDLYFNSGDLLMVDHENFIYFHDRVGDTFRWKGENVATTEVADTVGLVDFVQEVNVYGVHVPDHEGRIGMASIKMKENHEFDGKKLFQHIADYLPSYARPRFLRIQDTIEITGTFKHRKMTLVEEGFNPAVIKDALYFLDDTAKMYVPMTEDIYNAISAKTLKL

SEQ ID NO: 368 - protein, 1159 aa, Homo sapiens
MPVRRGHVAPQNTFLDTIIRKFEGQSRKFIIANARVENCAVIYCNDGFCELCGYSRAEVMQRPCTCDFLHGPRTQRRAAAQIAQALLGAEERKVEIAFYRKDGSCFLCLVDVVPVKNEDGAVIMFILNFEVVMEKDMVGSPAHDTNHRGPPTSWLAPGRAKTFRLKLPALLALTARESSVRSGGAGGAGAPGAVVVDVDLTPAAPSSESLALDEVTAMDNHVAGLGPAEERRALVGPGSPPRSAPGQLPSPRAHSLNPDASGSSCSLARTRSRESCASVRRASSADDIEAMRAGVLPPPPRHASTGAMHPLRSGLLNSTSDSDLVRYRTISKIPQITLNFVDLKGDPFLASPTSDREIIAPKIKERTHNVTEKVTQVLSLGADVLPEYKLQAPRIHRWTILHYSPFKAVWDWLILLLVIYTAVFTPYSAAFLLKETEEGPPATECGYACQPLAVVDLIVDIMFIVDILINFRTTYVNANEEVVSHPGRIAVHYFKGWFLIDMVAAIPFDLLIFGSGSEELIGLLKTARLLRLVRVARKLDRYSEYGAAVLFLLMCTFALIAHWLACIWYAIGNMEQPHMDSRIGWLHNLGDQIGKPYNSSGLGGPSIKDKYVTALYFTFSSLTSVGFGNVSPNTNSEKIFSICVMLIGSLMYASIFGNVSAIIQRLYSGTARYHTQMLRVREFIRFHQIPNPLRQRLEEYFQHAWSYTNGIDMNAVLKGFPECLQADICLHLNRSLLQHCKPFRGATKGCLRALAMKFKTTHAPPGDTLVHAGDLLTALYFISRGSIEILRGDVVVAILGKNDIFGEPLNLYARPGKSNGDVRALTYCDLHKIHRDDLLEVLDMYPEFSDHFWSSLEITFNLRDTNMIPGSPGSTELEGGFSRQRKRKLSFRRRTDKDTEQPGEVSALGPGRAGAGPSSRGRPGGPWGESPSSGPSSPESSEDEGPGRSSSPLRLVPFSSPRPPGEPPGGEPLMEDCEKSSDTCNPLSGAFSGVSNIFSFWGDSRGRQYQELPRCPAPTPSLLNIPLSSPGRRPRGDVESRLDALQRQLNRLETRLSADMATVLQLLQRQMTLVPPAYSAVTTPGPGPTSTSPLLPVSPLPTLTLDSLSQVSQFMACEELPPGAPELPQEGPTRRLSLPGQLGALTSQPLHRHGSDPGS

SEQ ID NO: 369 - protein, 406 aa, Homo sapiens
MPPVGGKKAKKGILERLNAGEIVIGDGGFVFALEKRGYVKAGPWTPEAAVEHPEAVRQLHREFLRAGSNVMQTFTFYASEDKLENRGNYVLEKISGQEVNEAACDIARQVADEGDALVAGGVSQTPSYLSCKSETEVKKVFLQQLEVFMKKNVDFLIAEYFEHVEEAVWAVETLIASGKPVAATMCIGPEGDLHGVPPGECAVRLVKAGASIIGVNCHFDPTISLKTVKLMKEGLEAAQLKAHLMSQPLAYHTPDCNKQGFIDLPEFPFGLEPRVATRWDIQKYAREAYNLGVRYIGGCCGFEPYHIRAIAEELAPERGFLPPASEKHGSWGSGLDMHTKPWVRARARKEYWENLRIASGRPYNPSMSKPDGWGVTKGTAELMQQKEATTEQQLKELFEKQKFKSQ

SEQ ID NO: 370 - protein, 154 aa, Homo sapiens
MGLSDGEWQLVLNVWGKVEADIPGHGQEVLIRLFKGHPETLEKFDKFKHLKSEDEMKASEDLKKHGATVLTALGGILKKKGHHEAEIKPLAQSHATKHKIPVKYLEFISECIIQVLQSKHPGDFGADAQGAMNKALELFRKDMASNYKELGFQG

SEQ ID NO: 371 - protein, 472 aa, Homo sapiens
MGSKMNLIEHSHLPTTDEFSFSENLFGVLTEQVAGPLGQNLEVEPYSQYSNVQFPQVQPQISSSSYYSNLGFYPQQPEEWYSPGIYELRRMPAETLYQGETEVAEMPVTKKPRMGASAGRIKGDELCVVCGDRASGYHYNALTCEGCKGFFRRSITKNAVYKCKNGGNCVMDMYMRRKCQECRLRKCKEMGMLAECLLTEIQCKSKRLRKNVKQHADQTVNEDSEGRDLRQVTSTTKSCREKTELTPDQQTLLHFIMDSYNKQRMPQEITNKILKEEFSAEENFLILTEMATNHVQVLVEFTKKLPGFQTLDHEDQIALLKGSAVEAMFLRSAEIFNKKLPSGHSDLLEERIRNSGISDEYITPMFSFYKSIGELKMTQEEYALLTAIVILSPDRQYIKDREAVEKLQEPLLDVLQKLCKIHQPENPQHFACLLGRLTELRTFNHHHAEMLMSWRVNDHKFTPLLCEIWDVQ

SEQ ID NO: 372 - protein, 295 aa, Homo sapiens
MELIQDISRPPLEYVKGVPLIKYFAEALGPLQSFQARPDDLLISTYPKSGTTWVSQILDMIYQGGDLEKCHRAPIFMRVPFLEFKVPGIPSGMETLKNTPAPRLLKTHLPLALLPQTLLDQKVKVVYVARNAKDVAVSYYHFYHMAKVYPHPGTWESFLEKFMAGEVSYGSWYQHVQEWWELSRTHPVLYLFYEDMKENPKREIQKILEFVGRSLPEETVDLMVEHTSFKEMKKNPMTNYTTVRREFMDHSISPFMRKGMAGDWKTTFTVAQNERFDADYAEKMAGCSLSFRSEL

SEQ ID NO: 373 - protein, 434 aa, Homo sapiens
MAMQKIFAREILDSRGNPTVEVDLHTAKGRFRAAVPSGASTGIYEALELRDGDKGRYLGKGVLKAVENINNTLGPALLQKKLSVADQEKVDKFMIELDGTENKSKFGANAILGVSLAVCKAGAAEKGVPLYRHIADLAGNPDLILPVPAFNVINGGSHAGNKLAMQEFMILPVGASSFKEAMRIGAEVYHHLKGVIKAKYGKDATNVGDEGGFAPNILENNEALELLKTAIQAAGYPDKVVIGMDVAASEFYRNGKYDLDFKSPDDPARHITGEKLGELYKSFIKNYPVVSIEDPFDQDDWATWTSFLSGVNIQIVGDDLTVTNPKRIAQAVEKKACNCLLLKVNQIGSVTESIQACKLAQSNGWGVMVSHRSGETEDTFIADLVVGLCTGQIKTGAPCRSERLAKYNQLMRIEEALGDKAIFAGRKFRNPKAK

SEQ ID NO: 374 - protein, 323 aa, Homo sapiens
MARGPGLAPPPLRLPLLLLVLAAVTGHTAAQDNCTCPTNKMTVCSPDGPGGRCQCRALGSGMAVDCSTLTSKCLLLKARMSAPKNARTLVRPSEHALVDNDGLYDPDCDPEGRFKARQCNQTSVCWCVNSVGVRRTDKGDLSLRCDELVRTHHILIDLRHRPTAGAFNHSDLDAELRRLFRERYRLHPKFVAAVHYEQPTIQIELRQNTSQKAAGEVDIGDAAYYFERDIKGESLFQGRGGLDLRVRGEPLQVERTLIYYLDEIPPKFSMKRLTAGLIAVIVVVVVALVAGMAVLVITNRRKSGKYKKVEIKELGELRKEPSL

SEQ ID NO: 375 - protein, 599 aa, Homo sapiens
MGPKRRQLTFREKSRIIQEVEENPDLRKGEIARRFNIPPSTLSTILKNKRAILASERKYGVASTCRKTNKLSPYDKLEGLLIAWFQQIRAAGLPVKGIILKEKALRIAEELGMDDFTASNGWLDRFRRRHGVVSCSGVARARARNAAPRTPAAPASPAAVPSEGSGGSTTGWRAREEQPPSVAEGYASQDVFSATETSLWYDFLPDQAAGLCGGDGRPRQATQRLSVLLCANADGSEKLPPLVAGKSAKPRAGQAGLPCDYTANSKGGVTTQALAKYLKALDTRMAAESRRVLLLAGRLAAQSLDTSGLRHVQLAFFPPGTVHPLERGVVQQVKGHYRQAMLLKAMAALEGQDPSGLQLGLTEALHFVAAAWQAVEPSDIAACFREAGFGGGPNATITTSLKSEGEEEEEEEEEEEEEEGEGEEEEEEGEEEEEEGGEGEELGEEEEVEEEGDVDSDEEEEEDEESSSEGLEAEDWAQGVVEAGGSFGAYGAQEEAQCPTLHFLEGGEDSDSDSEEEDDEEEDDEDEDDDDDEEDGDEVPVPSFGEAMAYFAMVKRYLTSFPIDDRVQSHILHLEHDLVHVTRKNHARQAGVRGLGHQS

SEQ ID NO: 376 - protein, 994 aa, Homo sapiens
MEAAHAKTTEECLAYFGVSETTGLTPDQVKRNLEKYGLNELPAEEGKTLWELVIEQFEDLLVRILLLAACISFVLAWFEEGEETITAFVEPFVILLILIANAIVGVWQERNAENAIEALKEYEPEMGKVYRADRKSVQRIKARDIVPGDIVEVAVGDKVPADIRILAIKSTTLRVDQSILTGESVSVIKHTEPVPDPRAVNQDKKNMLFSGTNIAAGKALGIVATTGVGTEIGKIRDQMAATEQDKTPLQQKLDEFGEQLSKVISLICVAVWLINIGHFNDPVHGGSWFRGAIYYFKIAVALAVAAIPEGLPAVITTCLALGTRRMAKKNAIVRSLPSVETLGCTSVICSDKTGTLTTNQMSVCKMFIIDKVDGDICLLNEFSITGSTYAPEGEVLKNDKPVRPGQYDGLVELATICALCNDSSLDFNEAKGVYEKVGEATETALTTLVEKMNVFNTDVRSLSKVERANACNSVIRQLMKKEFTLEFSRDRKSMSVYCSPAKSSRAAVGNKMFVKGAPEGVIDRCNYVRVGTTRVPLTGPVKEKIMAVIKEWGTGRDTLRCLALATRDTPPKREEMVLDDSARFLEYETDLTFVGVVGMLDPPRKEVTGSIQLCRDAGIRVIMITGDNKGTAIAICRRIGIFGENEEVADRAYTGREFDDLPLAEQREACRRACCFARVEPSHKSKIVEYLQSYDEITAMTGDGVNDAPALKKAEIGIAMGSGTAVAKTASEMVLADDNFSTIVAAVEEGRAIYNNMKQFIRYLISSNVGEVVCIFLTAALGLPEALIPVQLLWVNLVTDGLPATALGFNPPDLDIMDRPPRSPKEPLISGWLFFRYMAIGGYVGAATVGAAAWWFLYAEDGPHVNYSQLTHFMQCTEDNTHFEGIDCEVFEAPEPMTMALSVLVTIEMCNALNSLSENQSLLRMPPWVNIWLLGSICLSMSLHFLILYVDPLPMIFKLRALDLTQWLMVLKISLPVIGLDEILKFVARNYLEG

SEQ ID NO: 377 - protein, 101 aa, Homo sapiens
MARPLEQAVAAIVCTFQEYAGRCGDKYKLCQAELKELLQKELATWTPTEFRECDYNKFMSVLDTNKDCEVDFVEYVRSLACLCLYCHEYFKDCPSEPPCSQ

SEQ ID NO: 378 - protein, 2649 aa, Homo sapiens
MHSSSYSYRSSDSVFSNTTSTRTSLDSNENLLLVHCGPTLINSCISFGSESFDGHRLEMLQQIANRVQRDSVICEDKLILAGNALQSDSKRLESGVQFQNEAEIAGYILECENLLRQHVIDVQILIDGKYYQADQLVQRVAKLRDEIMALRNECSSVYSKGRILTTEQTKLMISGITQSLNSGFAQTLHPSLTSGLTQSLTPSLTSSSMTSGLSSGMTSRLTPSVTPAYTPGFPSGLVPNFSSGVEPNSLQTLKLMQIRKPLLKSSLLDQNLTEEEINMKFVQDLLNWVDEMQVQLDRTEWGSDLPSVESHLENHKNVHRAIEEFESSLKEAKISEIQMTAPLKLTYAEKLHRLESQYAKLLNTSRNQERHLDTLHNFVSRATNELIWLNEKEEEEVAYDWSERNTNIARKKDYHAELMRELDQKEENIKSVQEIAEQLLLENHPARLTIEAYRAAMQTQWSWILQLCQCVEQHIKENTAYFEFFNDAKEATDYLRNLKDAIQRKYSCDRSSSIHKLEDLVQESMEEKEELLQYKSTIANLMGKAKTIIQLKPRNSDCPLKTSIPIKAICDYRQIEITIYKDDECVLANNSHRAKWKVISPTGNEAMVPSVCFTVPPPNKEAVDLANRIEQQYQNVLTLWHESHINMKSVVSWHYLINEIDRIRASNVASIKTMLPGEHQQVLSNLQSRFEDFLEDSQESQVFSGSDITQLEKEVNVCKQYYQELLKSAEREEQEESVYNLYISEVRNIRLRLENCEDRLIRQIRTPLERDDLHESVFRITEQEKLKKELERLKDDLGTITNKCEEFFSQAAASSSVPTLRSELNVVLQNMNQVYSMSSTYIDKLKTVNLVLKNTQAAEALVKLYETKLCEEEAVIADKNNIENLISTLKQWRSEVDEKRQVFHALEDELQKAKAISDEMFKTYKERDLDFDWHKEKADQLVERWQNVHVQIDNRLRDLEGIGKSLKYYRDTYHPLDDWIQQVETTQRKIQENQPENSKTLATQLNQQKMLVSEIEMKQSKMDECQKYAEQYSATVKDYELQTMTYRAMVDSQQKSPVKRRRMQSSADLIIQEFMDLRTRYTALVTLMTQYIKFAGDSLKRLEEEEIKRCKETSEHGAYSDLLQRQKATVLENSKLTGKISELERMVAELKKQKSRVEEELPKVREAAENELRKQQRNVEDISLQKIRAESEAKQYRRELETIVREKEAAERELERVRQLTIEAEAKRAAVEENLLNFRNQLEENTFTRRTLEDHLKRKDLSLNDLEQQKNKLMEELRRKRDNEEELLKLIKQMEKDLAFQKQVAEKQLKEKQKIELEARRKITEIQYTCRENALPVCPITQATSCRAVTGLQQEHDKQKAEELKQQVDELTAANRKAEQDMRELTYELNALQLEKTSSEEKARLLKDKLDETNNTLRCLKLELERKDQAEKGYSQQLRELGRQLNQTTGKAEEAMQEASDLKKIKRNYQLELESLNHEKGKLQREVDRITRAHAVAEKNIQHLNSQIHSFRDEKELERLQICQRKSDHLKEQFEKSHEQLLQNIKAEKENNDKIQRLNEELEKSNECAEMLKQKVEELTRQNNETKLMMQRIQAESENIVLEKQTIQQRCEALKIQADGFKDQLRSTNEHLHKQTKTEQDFQRKIKCLEEDLAKSQNLVSEFKQKCDQQNIIIQNTKKEVRNLNAELNASKEEKRRGEQKVQLQQAQVQELNNRLKKVQDELHLKTIEEQMTHRKMVLFQEESGKFKQSAEEFRKKMEKLMESKVITENDISGIRLDFVSLQQENSRAQENAKLCETNIKELERQLQQYREQMQQGQHMEANHYQKCQKLEDELIAQKREVENLKQKMDQQIKEHEHQLVLLQCEIQKKSTAKDCTFKPDFEMTVKECQHSGELSSRNTGHLHPTPRSPLLRWTQEPQPLEEKWQHRVVEQIPKEVQFQPPGAPLEKEKSQQCYSEYFSQTSTELQITFDETNPITRLSEIEKIRDQALNNSRPPVRYQDNACEMELVKVLTPLEIAKNKQYDMHTEVTTLKQEKNPVPSAEEWMLEGCRASGGLKKGDFLKKGLEPETFQNFDGDHACSVRDDEFKFQGLRHTVTARQLVEAKLLDMRTIEQLRLGLKTVEEVQKTLNKFLTKATSIAGLYLESTKEKISFASAAERIIIDKMVALAFLEAQAATGFIIDPISGQTYSVEDAVLKGVVDPEFRIRLLEAEKAAVGYSYSSKTLSVFQAMENRMLDRQKGKHILEAQIASGGVIDPVRGIRVPPEIALQQGLLNNAILQFLHEPSSNTRVFPNPNNKQALYYSELLRMCVFDVESQCFLFPFGERNISNLNVKKTHRISVVDTKTGSELTVYEAFQRNLIEKSIYLELSGQQYQWKEAMFFESYGHSSHMLTDTKTGLHFNINEAIEQGTIDKALVKKYQEGLITLTELADSLLSRLVPKKDLHSPVAGYWLTASGERISVLKASRRNLVDRITALRCLEAQVSTGGIIDPLTGKKYRVAEALHRGLVDEGFAQQLRQCELVITGIGHPITNKMMSVVEAVNANIINKEMGIRCLEFQYLTGGLIEPQVHSRLSIEEALQVGIIDVLIATKLKDQKSYVRNIICPQTKRKLTYKEALEKADFDFHTGLKLLEVSEPLMTGISSLYYSS

SEQ ID NO: 379 - protein, 233 aa, Homo sapiens
MWQLLLPTALLLLVSAGMRTEDLPKAVVFLEPQWYSVLEKDSVTLKCQGAYSPEDNSTQWFHNESLISSQASSYFIDAATVNDSGEYRCQTNLSTLSDPVQLEVHIGWLLLQAPRWVFKEEDPIHLRCHSWKNTALHKVTYLQNGKDRKYFHHNSDFHIPKATLKDSGSYFCRGLVGSKNVSSETVNITITQGLAVSTISSFSPPGYQVSFCLVMVLLFAVDTGLYFSVKTNI

SEQ ID NO: 380 - protein, 233 aa, Homo sapiens; identical to SEQ ID NO: 379

SEQ ID NO: 381 - protein, 245 aa, Homo sapiens
MDVGPSSLPHLGLKLLLLLLLLPLRGQANTGCYGIPGMPGLPGAPGKDGYDGLPGPKGEPGIPAIPGIRGPKGQKGEPGLPGHPGKNGPMGPPGMPGVPGPMGIPGEPGEEGRYKQKFQSVFTVTRQTHQPPAPNSLIRFNAVLTNPQGDYDTSTGKFTCKVPGLYYFVYHASHTANLCVLLYRSGVKVVTFCGHTSKTNQVNSGGVLLRLQVGEEVWLAVNDYYDMVGIQGSDSVFSGFLLFPD

SEQ ID NO: 382 - protein, 441 aa, Homo sapiens
MVPPKLHVLFCLCGCLAVVYPFDWQYINPVAHMKSSAWVNKIQVLMAAASFGQTKIPRGNGPYSVGCTDLMFDHTNKGTFLRLYYPSQDNDRLDTLWIPNKEYFWGLSKFLGTHWLMGNILRLLFGSMTTPANWNSPLRPGEKYPLVVFSHGLGAFRTLYSAIGIDLASHGFIVAAVEHRDRSASATYYFKDQSAAEIGDKSWLYLRTLKQEEETHIRNEQVRQRAKECSQALSLILDIDHGKPVKNALDLKFDMEQLKDSIDREKIAVIGHSFGGATVIQTLSEDQRFRCGIALDAWMFPLGDEVYSRIPQPLFFINSEYFQYPANIIKMKKCYSPDKERKMITIRGSVHQNFADFTFATGKIIGHMLKLKGDIDSNVAIDLSNKASLAFLQKHLGLHKDFDQWDCLIEGDDENLIPGTNINTTNQHIMLQNSSGIEKYN

SEQ ID NO: 383 - protein, 219 aa, Homo sapiens
MGMSSLKLLKYVLFFFNLLFWICGCCILGFGIYLLIHNNFGVLFHNLPSLTLGNVFVIVGSIIMVVAFLGCMGSIKENKCLLMSFFILLLIILLAEVTLAILLFVYEQKLNEYVAKGLTDSIHRYHSDNSTKAAWDSIQSFLQCCGINGTSDWTSGPPASCPSDRKVEGCYAKARLWFHSNFLYIGIITICVCVIEVLGMSFALTLNCQIDKTSQTIGL

SEQ ID NO: 384 - protein, 569 aa, Homo sapiens
MKVLLRLICFIALLISSLEADKCKEREEKIILVSSANEIDVRPCPLNPNEHKGTITWYKDDSKTPVSTEQASRIHQHKEKLWFVPAKVEDSGHYYCVVRNSSYCLRIKISAKFVENEPNLCYNAQAIFKQKLPVAGDGGLVCPYMEFFKNENNELPKLQWYKDCKPLLLDNIHFSGVKDRLIVMNVAEKHRGNYTCHASYTYLGKQYPITRVIEFITLEENKPTRPVIVSPANETMEVDLGSQIQLICNVTGQLSDIAYWKWNGSVIDEDDPVLGEDYYSVENPANKRRSTLITVLNISEIESRFYKHPFTCFAKNTHGIDAAYIQLIYPVTNFQKHMIGICVTLTVIIVCSVFIYKIFKIDIVLWYRDSCYDFLPIKASDGKTYDAYILYPKTVGEGSTSDCDIFVFKVLPEVLEKQCGYKLFIYGRDDYVGEDIVEVINENVKKSRRLIIILVRETSGFSWLGGSSEEQIAMYNALVQDGIKVVLLELEKIQDYEKMPESIKFIKQKHGAIRWSGDFTQGPQSAKTRFWKNVRYHMPVQRRSPSSKHQLLSPATKEKLQREAHVPLG

SEQ ID NO: 385 - protein, 825 aa, Homo sapiens
MGWLCSGLLFPVSCLVLLQVASSGNMKVLQEPTCVSDYMSISTCEWKMNGPTNCSTELRLLYQLVFLLSEAHTCIPENNGGAGCVCHLLMDDVVSADNYTLDLWAGQQLLWKGSFKPSEHVKPRAPGNLTVHTNVSDTLLLTWSNPYPPDNYLYNHLTYAVNIWSENDPADFRIYNVTYLEPSLRIAASTLKSGISYRARVRAWAQCYNTTWSEWSPSTKWHNSYREPFEQHLLLGVSVSCIVILAVCLLCYVSITKIKKEWWDQIPNPARSRLVAIIIQDAQGSQWEKRSRGQEPAKCPHWKNCLTKLLPCFLEHNMKRDEDPHKAAKEMPFQGSGKSAWCPVEISKTVLWPESISVVRCVELFEAPVECEEEEEVEEEKGSFCASPESSRDDFQEGREGIVARLTESLFLDLLGEENGGFCQQDMGESCLLPPSGSTSAHMPWDEFPSAGPKEAPPWGKEQPLHLEPSPPASPTQSPDNLTCTETPLVIAGNPAYRSFSNSLSQSPCPRELGPDPLLARHLEEVEPEMPCVPQLSEPTTVPQPEPETWEQILRRNVLQHGAAAAPVSAPTSGYQEFVHAVEQGGTQASAVVGLGPPGEAGYKAFSSLLASSAVSPEKCGFGASSGEEGYKPFQDLIPGCPGDPAPVPVPLFTFGLDREPPRSPQSSHLPSSSPEHLGLEPGEKVEDMPKPPLPQEQATDPLVDSLGSGIVYSALTCHLCGHLKQCHGQEDGGQTPVMASPCCGCCCGDRSSPPTTPLRAPDPSPGGVPLEASLCPASLAPSGISEKSKSSSSFHPAPGNAQSSSQTPKIVNFVSVGPTYMRVS

SEQ ID NO: 386 - protein, 354 aa, Homo sapiens
MRLAVLFSGALLGLLAAQGTGNDCPHKKSATLLPSFTVTPTVTESTGTTSHRTTKSHKTTTHRTTTTGTTSHGPTTATHNPTTTSHGNVTVHPTSNSTATSQGPSTATHSPATTSHGNATVHPTSNSTATSPGFTSSAHPEPPPPSPSPSPTSKETIGDYTWTNGSQPCVHLQAQIQIRVMYTTQGGGEAWGISVLNPNKTKVQGSCEGAHPHLLLSFPYGHLSFGFMQDLQQKVVYLSYMAVEYNVSFPHAAKWTFSAQNASLRDLQAPLGQSFSCSNSSIILSPAVHLDLLSLRLQAAQLPHTGVFGQSFSCPSDRSILLPLIIGLILLGLLALVLIAFCIIRRRPSAYQAL

SEQ ID NO: 387 - protein, 374 aa, Homo sapiens
MLSTSRSRFIRNTNESGEEVTTFFDYDYGAPCHKFDVKQIGAQLLPPLYSLVFIFGFVGNMLVVLILINCKKLKCLTDIYLLNLAISDLLFLITLPLWAHSAANEWVFGNAMCKLFTGLYHIGYFGGIFFIILLTIDRYLAIVHAVFALKARTVTFGVVTSVITWLVAVFASVPGIIFTKCQKEDSVYVCGPYFPRGWNNFHTIMRNILGLVLPLLIMVICYSGILKTLLRCRNEKKRHRAVRVIFTIMIVYFLFWTPYNIVILLNTFQEFFGLSNCESTSQLDQATQVTETLGMTHCCINPIIYAFVGEKFRSLFHIALGCRIAPLQKPVCGGPGVRPGKNVKVTTQGLLDGRGKGKSIGRAPEASLQDKEGA

SEQ ID NO: 388 - protein, 232 aa, Homo sapiens
MEHTGHYLHLAFLMTTVFSLSPGTKANYTRLWANSTSSWDSVIQNKTGRNQNENINTNPITPEVDYKGNSTNMPETSHIVALTSKSEQELYIPSVVSNSPSTVQSIENTSKSHGEIFKKDVCAENNNNMAMLICLIIIAVLFLICTFLFLSTVVLANKVSSLRRSKQVGKRQPRSNGDFLASGLWPAESDTWKRTKQLTGPNLVMQSTGVLTATRERKDEEGTEKLTNKQIG

SEQ ID NO: 389 - protein, 375 aa, Homo sapiens
MERASCLLLLLLPLVHVSATTPEPCELDDEDFRCVCNFSEPQPDWSEAFQCVSAVEVEIHAGGLNLEPFLKRVDADADPRQYADTVKALRVRRLTVGAAQVPAQLLVGALRVLAYSRLKELTLEDLKITGTMPPLPLEATGLALSSLRLRNVSWATGRSWLAELQQWLKPGLKVLSIAQAHSPAFSCEQVRAFPALTSLDLSDNPGLGERGLMAALCPHKFPAIQNLALRNTGMETPTGVCAALAAAGVQPHSLDLSHNSLRATVNPSAPRCMWSSALNSLNLSFAGLEQVPKGLPAKLRVLDLSCNRLNRAPQPDELPEVDNLTLDGNPFLVPGTALPHEGSMNSGVVPACARSTLSVGVSGTLVLLQGARGFA

SEQ ID NO: 390 - protein, 825 aa, Homo sapiens; identical to SEQ ID NO: 385

SEQ ID NO: 391 - protein, 769 aa, Homo sapiens
MLGLRPPLLALVGLLSLGCVLSQECTKFKVSSCRECIESGPGCTWCQKLNFTGPGDPDSIRCDTRPQLLMRGCAADDIMDPTSLAETQEDHNGGQKQLSPQKVTLYLRPGQAAAFNVTFRRAKGYPIDLYYLMDLSYSMLDDLRNVKKLGGDLLRALNEITESGRIGFGSFVDKTVLPFVNTHPDKLRNPCPNKEKECQPPFAFRHVLKLTNNSNQFQTEVGKQLISGNLDAPEGGLDAMMQVAACPEEIGWRNVTRLLVFATDDGFHFAGDGKLGAILTPNDGRCHLEDNLYKRSNEFDYPSVGQLAHKLAENNIQPIFAVTSRMVKTYEKLTEIIPKSAVGELSEDSSNVVHLIKNAYNKLSSRVFLDHNALPDTLKVTYDSFCSNGVTHRNQPRGDCDGVQINVPITFQVKVTATECIQEQSFVIRALGFTDIVTVQVLPQCECRCRDQSRDRSLCHGKGFLECGICRCDTGYIGKNCECQTQGRSSQELEGSCRKDNNSIICSGLGDCVCGQCLCHTSDVPGKLIYGQYCECDTINCERYNGQVCGGPGRGLCFCGKCRCHPGFEGSACQCERTTEGCLNPRRVECSGRGRCRCNVCECHSGYQLPLCQECPGCPSPCGKYISCAECLKFEKGPFGKNCSAACPGLQLSNNPVKGRTCKERDSEGCWVAYTLEQQDGMDRYLIYVDESRECVAGPNIAAIVGGTVAGIVLIGILLLVIWKALIHLSDLREYRRFEKEKLKSQWNNDNPLFKSATTTVMNPKFAES

SEQ ID NO: 392 - protein, 464 aa, Homo sapiens
MTPILTVLICLGLSLGPRTHVQAGPFPKPTLWAEPGSVISWGSPVTIWCQGSLEAQEYRLDKEGSPEPWDRNNPLEPKNKARFSIPSITEHHAGRYRCHYYSSAGWSEPSDALELVMTGAYSKPTLSALPSPVVASGGNMTLQCGSQKGYHQFVLMKEGEHQLPRTLDSQQLHSGGFQALFPVGPVNPSHRWRFTCYYYYMNTPRVWSHPSDPLEILPSGVSRKPSLLTLQGPVLAPGQSLTLQCGSDVGYDRFVLYKEGERDFLQRPGQQPQAGLSQANFTLGPVSPSHGGQYRCYGAHNLSSEWSAPSDPLNILMAGQIYDTVSLSAQPGPTVASGENVTLLCQSWWQFDTFLLTKEGAAHPPLRLRSMYGAHKYQAEFPMSPVTSAHAGTYRCYGSYSSNPHLLSFPSEPLELMVSASHAKDYTVENLIRMGMAGLVLVFLGILLFEAQHSQRNPQDAARR

SEQ ID NO: 393 - protein, 463 aa, Homo sapiens
MGAGPSLLLAALLLLLSGDGAVRCDTPANCTYLDLLGTWVFQVGSSGSQRDVNCSVMGPQEKKVVVYLQKLDTAYDDLGNSGHFTIIYNQGFEIVLNDYKWFAFFKYKEEGSKVTTYCNETMTGWVHDVLGRNWACFTGKKVGTASENVYVNTAHLKNSQEKYSNRLYKYDHNFVKAINAIQKSWTATTYMEYETLTLGDMIRRSGGHSRKIPRPKPAPLTAEIQQKILHLPTSWDWRNVHGINFVSPVRNQASCGSCYSFASMGMLEARIRILTNNSQTPILSPQEVVSCSQYAQGCEGGFPYLIAGKYAQDFGLVEEACFPYTGTDSPCKMKEDCFRYYSSEYHYVGGFYGGCNEALMKLELVHHGPMAVAFEVYDDFLHYKKGIYHHTGLRDPFNPFELTNHAVLLVGYGTDSASGMDYWIVKNSWGTGWGENGYFRIRRGTDECAIESIAVAATPIPKL

SEQ ID NO: 394 - protein, 348 aa, Homo sapiens
MGPRARPALLLLMLLQTAVLQGRLLRSHSLHYLFMGASEQDLGLSLFEALGYVDDQLFVFYDHESRRVEPRTPWVSSRISSQMWLQLSQSLKGWDHMFTVDFWTIMENHNHSKESHTLQVILGCEMQEDNSTEGYWKYGYDGQDHLEFCPDTLDWRAAEPRAWPTKLEWERHKIRARQNRAYLERDCPAQLQQLLELGRGVLDQQVPPLVKVTHHVTSSVTTLRCRALNYYPQNITMKWLKDKQPMDAKEFEPKDVLPNGDGTYQGWITLAVPPGEEQRYTCQVEHPGLDQPLIVIWEPSPSGTLVIGVISGIAVFVVILFIGILFIILRKRQGSRGAMGHYVLAERE

SEQ ID NO: 395 - protein, 348 aa, Homo sapiens; identical to SEQ ID NO: 394

SEQ ID NO: 396 - protein, 406 aa, Homo sapiens
MSGAPTAGAALMLCAATAVLLSAQGGPVQSKSPRFASWDEMNVLAHGLLQLGQGLREHAERTRSQLSALERRLSACGSACQGTEGSTDLPLAPESRVDPEVLHSLQTQLKAQNSRIQQLFHKVAQQQRHLEKQHLRIQHLQSQFGLLDHKHLDHEVAKPARRKRLPEMAQPVDPAHNVSRLHRLPRDCQELFQVGERQSGLFEIQPQGSPPFLVNCKMTSDGGWTVIQRRHDGSVDFNRPWEAYKAGFGDPHGEFWLGLEKVHSITGDRNSRLAVQLRDWDGNAELLQFSVHLGGEDTAYSLQLTAPVAGQLGATTVPPSGLSVPFSTWDQDHDLRRDKNCAKSLSGGWWFGTCSHSNLNGQYFRSIPQQRQKLKKGIFWKTWRGRYYPLQATTMLIQPMAAEAAS

SEQ ID NO: 397 - protein, 417 aa, Homo sapiens
MRFAWTVLLLGPLQLCALVHCAPPAAGQQQPPREPPAAPGAWRQQIQWENNGQVFSLLSLGSQYQPQRRRDPGAAVPGAANASAQQPRTPILLIRDNRTAAARTRTAGSSGVTAGRPRPTARHWFQAGYSTSRAREAGASRAENQTAPGEVPALSNLRPPSRVDGMVGDDPYNPYKYSDDNPYYNYYDTYERPRPGGRYRPGYGTGYFQYGLPDLVADPYYIQASTYVQKMSMYNLRCAAEENCLASTAYRADVRDYDHRVLLRFPQRVKNQGTSDFLPSRPRYSWEWHSCHQHYHSMDEFSHYDLLDANTQRRVAEGHKASFCLEDTSCDYGYHRRFACTAHTQGLSPGCYDTYGADIDCQWIDITDVKPGNYILKVSVNPSYLVPESDYTNNVVRCDIRYTGHHAYASGCTISPY

SEQ ID NO: 398 - protein, 1010 aa, Homo sapiens
MGYARASGVCARGCLDSAGPWTMSRALRPPLPPLCFFLLLLAAAGARAGGYETCPTVQPNMLNVHLLPHTHDDVGWLKTVDQYFYGIKNDIQHAGVQYILDSVISALLADPTRRFIYVEIAFFSRWWHQQTNATQEVVRDLVRQGRLEFANGGWVMNDEAATHYGAIVDQMTLGLRFLEDTFGNDGRPRVAWHIDPFGHSREQASLFAQMGFDGFFFGRLDYQDKWVRMQKLEMEQVWRASTSLKPPTADLFTGVLPNGYNPPRNLCWDVLCVDQPLVEDPRSPEYNAKELVDYFLNVATAQGRYYRTNHTVMTMGSDFQYENANMWFKNLDKLIRLVNAQQAKGSSVHVLYSTPACYLWELNKANLTWSVKHDDFFPYADGPHQFWTGYFSSRPALKRYERLSYNFLQVCNQLEALVGLAANVGPYGSGDSAPLNEAMAVLQHHDAVSGTSRQHVANDYARQLAAGWGPCEVLLSNALARLRGFKDHFTFCQQLNISICPLSQTAARFQVIVYNPLGRKVNWMVRLPVSEGVFVVKDPNGRTVPSDVVIFPSSDSQAHPPELLFSASLPALGFSTYSVAQVPRWKPQARAPQPIPRRSWSPALTIENEHIRATFDPDTGLLMEIMNMNQQLLLPVRQTFFWYNASIGDNESDQASGAYIFRPNQQKPLPVSRWAQIHLVKTPLVQEVHQNFSAWCSQVVRLYPGQRHLELEWSVGPIPVGDTWGKEVISRFDTPLETKGRFYTDSNGREILERRRDYRPTWKLNQTEPVAGNYYPVNTRIYITDGNMQLTVLTDRSQGGSSLRDGSLELMVHRRLLKDDGRGVSEPLMENGSGAWVRGRHLVLLDTAQAAAAGHRLLAEQEVLAPQVVLAPGGGAAYNLGAPPRTQFSGLRRDLPPSVHLLTLASWGPEMVLLRLEHQFAVGEDSGRNLSAPVTLNLRDLFSTFTITRLQETTLVANQLREAASRLKWTTNTGPTPHQTPYQLDPANITLEPMEIRTFLASVQWKEVDG

SEQ ID NO: 399 - protein, 572 aa, Homo sapiens
MSFQGKKSIPRITSDRLLIRGGRIVNDDQSFYADVHVEDGLIKQIGENLIVPGGIKTIDAHGLMVLPGGVDVHTRLQMPVLGMTPADDFCQGTKAALAGGTTMILDHVFPDTGVSLLAAYERWRERADSAACCDYSLHVDITRWHESIKEELEALVKEKGVNSFLVFMAYKDRCQCSDSQMYEIFSIIRDLGALAQVHAENGDIVEEEQKRLLELGITGPEGHVLSHPEEVEAEAVYRAVTIAKQANCPLYVTKVMSKGAADAIAQAKRRGVVVFGEPITASLGTDGSHYWSKNWAKAAAFVTSPPVNPDPTTADHLTCLLSSGDLQVTGSAHCTFTTAQKAVGKDNFALIPEGTNGIEERMSMVWEKCVASGKMDENEFVAVTSTNAAKIFNFYPRKGRVAVGSDADLVIWNPKATKIISAKTHNLNVEYNIFEGVECRGAPAVVISQGRVALEDGKMFVTPGAGRFVPRKTFPDFVYKRIKARNRLAEIHGVPRGLYDGPVHEVMVPAKPGSGAPARASCPGKISVPPVRNLHQSGFSLSGSQADDHIARRTAQKIMAPPGGRSNITSLS

SEQ ID NO: 400 - protein, 1304 aa, Homo sapiens
MYLWLKLLAFGFAFLDTEVFVTGQSPTPSPTGLTTAKMPSVPLSSDPLPTHTTAFSPASTFERENDFSETTTSLSPDNTSTQVSPDSLDNASAFNTTGVSSVQTPHLPTHADSQTPSAGTDTQTFSGSAANAKLNPTPGSNAISDVPGERSTASTFPTDPVSPLTTTLSLAHHSSAALPARTSNTTITANTSDAYLNASETTTLSPSGSAVISTTTIATTPSKPTCDEKYANITVDYLYNKETKLFTAKLNVNENVECGNNTCTNNEVHNLTECKNASVSISHNSCTAPDKTLILDVPPGVEKFQLHDCTQVEKADTTICLKWKNIETFTCDTQNITYRFQCGNMIFDNKEIKLENLEPEHEYKCDSEILYNNHKFTNASKIIKTDFGSPGEPQIIFCRSEAAHQGVITWNPPQRSFHNFTLCYIKETEKDCLNLDKNLIKYDLQNLKPYTKYVLSLHAYIIAKVQRNGSAAMCHFTTKSAPPSQVWNMTVSMTSDNSMHVKCRPPRDRNGPHERYHLEVEAGNTLVRNESHKNCDFRVKDLQYSTDYTFKAYFHNGDYPGEPFILHHSTSYNSKALIAFLAFLIIVTSIALLVVLYKIYDLHKKRSCNLDEQQELVERDDEKQLMNVEPIHADILLETYKRKIADEGRLFLAEFQSIPRVFSKFPIKEARKPFNQNKNRYVDILPYDYNRVELSEINGDAGSNYINASYIDGFKEPRKYIAAQGPRDETVDDFWRMIWEQKATVIVMVTRCEEGNRNKCAEYWPSMEEGTRAFGDVVVKINQHKRCPDYIIQKLNIVNKKEKATGREVTHIQFTSWPDHGVPEDPHLLLKLRRRVNAFSNFFSGPIVVHCSAGVGRTGTYIGIDAMLEGLEAENKVDVYGYVVKLRRQRCLMVQVEAQYILIHQALVEYNQFGETEVNLSELHPYLHNMKKRDPPSEPSPLEAEFQRLPSYRSWRTQHIGNQEENKSKNRNSNVIPYDYNRVPLKHELEMSKESEHDSDESSDDDSDSEEPSKYINASFIMSYWKPEVMIAAQGPLKETIGDFWQMIFQRKVKVIVMLTELKHGDQEICAQYWGEGKQTYGDIEVDLKDTDKSSTYTLRVFELRHSKRKDSRTVYQYQYTNWSVEQLPAEPKELISMIQVVKQKLPQKNSSEGNKHHKSTPLLIHCRDGSQQTGIFCALLNLLESAETEEVVDIFQVVKALRKARPGMVSTFEQYQFLYDVIASTYPAQNGQVKKNNHQEDKIEFDNEVDKVKQDANCVNPLGAPEKLPEAKEQAEGSEPTSGTEGPEHSVNGPASPALNQGS

SEQ ID NO: 401 - protein, 618 aa, Homo sapiens
MHKTASQRLFPGPSYQNIKSIMEDSTILSDWTNSNKQKMKYDFSCELYRMSTYSTFPAGVPVSERSLARAGFYYTGVNDKVKCFCCGLMLDNWKLGDSPIQKHKQLYPSCSFIQNLVSASLGSTSKNTSPMRNSFAHSLSPTLEHSSLFSGSYSSLSPNPLNSRAVEDISSSRTNPYSYAMSTEEARFLTYHMWPLTFLSPSELARAGFYYIGPGDRVACFACGGKLSNWEPKDDAMSEHRRHFPNCPFLENSLETLRFSISNLSMQTHAARMRTFMYWPSSVPVQPEQLASAGFYYVGRNDDVKCFCCDGGLRCWESGDDPWVEHAKWFPRCEFLIRMKGQEFVDEIQGRYPHLLEQLLSTSDTTGEENADPPIIHFGPGESSSEDAVMMNTPVVKSALEMGFNRDLVKQTVQSKILTTGENYKTVNDIVSALLNAEDEKREEEKEKQAEEMASDDLSLIRKNRMALFQQLTCVLPILDNLLKANVINKQEHDIIKQKTQIPLQARELIDTILVKGNAAANIFKNCLKEIDSTLYKNLFVDKNMKYIPTEDVSGLSLEEQLRRLQEERTCKVCMDKEVSVVFIPCGHLVVCQECAPSLRKCPICRGIIKGTVRTFLS

SEQ ID NO: 402 - protein, 757 aa, Homo sapiens
MAGLTAAAPRPGVLLLLLSILHPSRPGGVPGAIPGGVPGGVFYPGAGLGALGGGALGPGGKPLKPVPGGLAGAGLGAGLGAFPAVTFPGALVPGGVADAAAAYKAAKAGAGLGGVPGVGGLGVSAGAVVPQPGAGVKPGKVPGVGLPGVYPGGVLPGARFPGVGVLPGVPTGAGVKPKAPGVGGAFAGIPGVGPFGGPQPGVPLGYPIKAPKLPGGYGLPYTTGKLPYGYGPGGVAGAAGKAGYPTGTGVGPQAAAAAAAKAAAKFGAGAAGVLPGVGGAGVPGVPGAIPGIGGIAGVGTPAAAAAAAAAAKAAKYGAAAGLVPGGPGFGPGVVGVPGAGVPGVGVPGAGIPVVPGAGIPGAAVPGVVSPEAAAKAAAKAAKYGARPGVGVGGIPTYGVGAGGFPGFGVGVGGIPGVAGVPSVGGVPGVGGVPGVGISPEAQAAAAAKAAKYGVGTPAAAAAKAAAKAAQFGLVPGVGVAPGVGVAPGVGVAPGVGLAPGVGVAPGVGVAPGVGVAPGIGPGGVAAAAKSAAKVAAKAQLRAAAGLGAGIPGLGVGVGVPGLGVGAGVPGLGVGAGVPGFGAGADEGVRRSLSPELREGDPSSSQHLPSTPSSPRVPGALAAAKAAKYGAAVPGVLGGLGALGGVGIPGGVVGAGPAAAAAAAKAAAKAAQFGLVGAAGLGGLGVGGLGVPGVGGLGGIPPAAAAKAAKYGAAGLGGVLGGAGQFPLGGVAARPGFGLSPIFPGGACLGKACGRKRK

SEQ ID NO: 403 - protein, 281 aa, Homo sapiens
MSAQESCLSLIKYFLFVFNLFFFVLGSLIFCFGIWILIDKTSFVSFVGLAFVPLQIWSKVLAISGIFTMGIALLGCVGALKELRCLLGLYFGMLLLLFATQITLGILISTQRAQLERSLRDVVEKTIQKYGTNPEETAAEESWDYVQFQLRCCGWHYPQDWFQVLILRGNGSEAHRVPCSCYNLSATNDSTILDKVILPQLSRLGHLARSRHSADICAVPAESHIYREGCAQGLQKWLHNNLISIVGICLGVGLLELGFMTLSIFLCRNLDHVYNRLARYR

SEQ ID NO: 404 - protein, 309 aa, Homo sapiens
MVGFKATDVPPTATVKFLGAGTAACIADLITFPLDTAKVRLQIQGESQGPVRATASAQYRGVMGTILTMVRTEGPRSLYNGLVAGLQRQMSFASVRIGLYDSVKQFYTKGSEHASIGSRLLAGSTTGALAVAVAQPTDVVKVRFQAQARAGGGRRYQSTVNAYKTIAREEGFRGLWKGTSPNVARNAIVNCAELVTYDLIKDALLKANLMTDDLPCHFTSAFGAGFCTTVIASPVDVVKTRYMNSALGQYSSAGHCALTMLQKEGPRAFYKGFMPSFLRLGSWNVVMFVTYEQLKRALMAACTSREAPF

SEQ ID NO: 405 - protein, 369 aa, Homo sapiens
MLKPSLPFTSLLFLQLPLLGVGLNTTILTPNGNEDTTADFFLTTMPTDSLSVSTLPLPEVQCFVFNVEYMNCTWNSSSEPQPTNLTLHYWYKNSDNDKVQKCSHYLFSEEITSGCQLQKKEIHLYQTFVVQLQDPREPRRQATQMLKLQNLVIPWAPENLTLHKLSESQLELNWNNRFLNHCLEHLVQYRTDWDHSWTEQSVDYRHKFSLPSVDGQKRYTFRVRSRFNPLCGSAQHWSEWSHPIHWGSNTSKENPFLFALEAVVISVGSMGLIISLLCVYFWLERTMPRIPTLKNLEDLVTEYHGNFSAWSGVSKGLAESLQPDYSERLCLVSEIPPKGGALGEGPGASPCNQHSPYWAPPCYTLKPET

SEQ ID NO: 406 - protein, 1237 aa, Homo sapiens
MDAKARNCLLQHREALEKDIKTSYIMDHMISDGFLTISEEEKVRNEPTQQQRAAMLIKMILKKDNDSYVSFYNALLHEGYKDLAALLHDGIPVVSSSSVRTVLCEGGVPQRPVVFVTRKKLVNAIQQKLSKLKGEPGWVTIHGMAGCGKSVLAAEAVRDHSLLEGCFPGGVHWVSVGKQDKSGLLMKLQNLCTRLDQDESFSQRLPLNIEEAKDRLRILMLRKHPRSLLILDDVWDSWVLKAFDSQCQILLTTRDKSVTDSVMGPKYVVPVESSLGKEKGLEILSLFVNMKKADLPEQAHSIIKECKGSPLVVSLIGALLRDFPNRWEYYLKQLQNKQFKRIRKSSSYDYEALDEAMSISVEMLREDIKDYYTDLSILQKDVKVPTKVLCILWDMETEEVEDILQEFVNKSLLFCDRNGKSFRYYLHDLQVDFLTEKNCSQLQDLHKKIITQFQRYHQPHTLSPDQEDCMYWYNFLAYHMASAKMHKELCALMFSLDWIKAKTELVGPAHLIHEFVEYRHILDEKDCAVSENFQEFLSLNGHLLGRQPFPNIVQLGLCEPETSEVYQQAKLQAKQEVDNGMLYLEWINKKNITNLSRLVVRPHTDAVYHACFSEDGQRIASCGADKTLQVFKAETGEKLLEIKAHEDEVLCCAFSTDDRFIATCSVDKKVKIWNSMTGELVHTYDEHSEQVNCCHFTNSSHHLLLATGSSDCFLKLWDLNQKECRNTMFGHTNSVNHCRFSPDDKLLASCSADGTLKLWDATSANERKSINVKQFFLNLEDPQEDMEVIVKCCSWSADGARIMVAAKNKIFLFDIHTSGLLGEIHTGHHSTIQYCDFSPQNHLAVVALSQYCVELWNTDSRSKVADCRGHLSWVHGVMFSPDGSSFLTSSDDQTIRLWETKKVCKNSAVMLKQEVDVVFQENEVMVLAVDHIRRLQLINGRTGQIDYLTEAQVSCCCLSPHLQYIAFGDENGAIEILELVNNRIFQSRFQHKKTVWHIQFTADEKTLISSSDDAEIQVWNWQLDKCIFLRGHQETVKDFRLLKNSRLLSWSFDGTVKVWNIITGNKEKDFVCHQGTVLSCDISHDATKFSSTSADKTAKIWSFDLLLPLHELRGHNGCVRCSAFSVDSTLLATGDDNGEIRIWNVSNGELLHLCAPLSEEGAATHGGWVTDLCFSPDGKMLISAGGYIKWWNVVTGESSQTFYTNGTNLKKIHVSPDFKTYVTVDNLGILYILQTLE

SEQ ID NO: 407 - protein, 79 aa, Homo sapiens [sequence omitted]

SEQ ID NO: 408 - protein, 632 aa, Homo sapiens
MDTMMLNVRNLFEQLVRRVEILSEGNEVQFIQLAKDFEDFRKKWQRTDHELGKYKDLLMKAETERSALDVKLKHARNQVDVEIKRRQRAEADCEKLERQIQLIREMLMCDTSGSIQLSEEQKSALAFLNRGQPSSSNAGNKRLSTIDESGSILSDISFDKTDESLDWDSSLVKTFKLKKREKRRSTSRQFVDGPPGPVKKTRSIGSAVDQGNESIVAKTTVTVPNDGGPIEAVSTIETVPYWTRSRRKTGTLQPWNSDSTLNSRQLEPRTETDSVGTPQSNGGMRLHDFVSKTVIKPESCVPCGKRIKFGKLSLKCRDCRVVSHPECRDRCPLPCIPTLIGTPVKIGEGMLADFVSQTSPMIPSIVVHCVNEIEQRGLTETGLYRISGCDRTVKELKEKFLRVKTVPLLSKVDDIHAICSLLKDFLRNLKEPLLTFRLNRAFMEAAEITDEDNSIAAMYQAVGELPQANRDTLAFLMIHLQRVAQSPHTKMDVANLAKVFGPTIVAHAVPNPDPVTMLQDIKRQPKVVERLLSLPLEYWSQFMMVEQENIDPLHVIENSNAFSTPQTPDIKVSLLGPVTTPEHQLLKTPSSSSLSQRVRSTLTKNTPRFGSKSKSATNLGRQGNFFASPMLK

SEQ ID NO: 409 - protein, 175 aa, Homo sapiens
MASLRVERAGGPRLPRTRVGRPAAVRLLLLLGAVLNPHEALAQPLPTTGTPGSEGGTVKNYETAVQFCWNHYKDQMDPIEKDWCDWAMISRPYSTLRDCLEHFAELFDLGFPNPLAERIIFETHQIHFANCSLVQPTFSDPPEDVLLAMIIAPICLIPFLITLVVWRSKDSEAQA

SEQ ID NO: 410 - protein, 61 aa, Homo sapiens
MDPNCSCATGGSCTCAGSCKCKECKCTSCKKSCCSCCPVGCAKCAQGCVCKGASEKCSCCA

SEQ ID NO: 411 - protein, 979 aa, Homo sapiens
MALFAVFQTTFFLTLLSLRTYQSEVLAERLPLTPVSLKVSTNSTRQSLHLQWTVHNLPYHQELKMVFQIQISRIETSNVIWVGNYSTTVKWNQVLHWSWESELPLECATHFVRIKSLVDDAKFPEPNFWSNWSSWEEVSVQDSTGQDILFVFPKDKLVEEGTNVTICYVSRNIQNNVSCYLEGKQIHGEQLDPHVTAFNLNSVPFIRNKGTNIYCEASQGNVSEGMKGIVLFVSKVLEEPKDFSCETEDFKTLHCTWDPGTDTALGWSKQPSQSYTLFESFSGEKKLCTHKNWCNWQITQDSQETYNFTLIAENYLRKRSVNILFNLTHRVYLMNPFSVNFENVNATNAIMTWKVHSIRNNFTYLCQIELHGEGKMMQYNVSIKVNGEYFLSELEPATEYMARVRCADASHFWKWSEWSGQNFTTLEAAPSEAPDVWRIVSLEPGNHTVTLFWKPLSKLHANGKILFYNVVVENLDKPSSSELHSIPAPANSTKLILDRCSYQICVIANNSVGASPASVIVISADPENKEVEEERIAGTEGGFSLSWKPQPGDVIGYVVDWCDHTQDVLGDFQWKNVGPNTTSTVISTDAFRPGVRYDFRIYGLSTKRIACLLEKKTGYSQELAPSDNPHVLVDTLTSHSFTLSWKDYSTESQPGFIQGYHVYLKSKARQCHPRFEKAVLSDGSECCKYKIDNPEEKALIVDNLKPESFYEFFITPFTSAGEGPSATFTKVTTPDEHSSMLIHILLPMVFCVLLIMVMCYLKSQWIKETCYPDIPDPYKSSILSLIKFKENPHLIIMNVSDCIPDAIEVVSKPEGTKIQFLGTRKSLTETELTKPNYLYLLPTEKNHSGPGPCICFENLTYNQAASDSGSCGHVPVSPKAPSMLGLMTSPENVLKALEKNYMNSLGEIPAGETSLNYVSQLASPMFGDKDSLPTNPVEAPHCSEYKMQMAVSLRLALPPPTENSSLSSITLLDPGEHYC

SEQ ID NO: 412 - protein, 331 aa, Homo sapiens
MKRLVCVLLVCSSAVAQLHKDPTLDHHWHLWKKTYGKQYKEKNEEAVRRLIWEKNLKFVMLHNLEHSMGMHSYDLGMNHLGDMTSEEVMSLMSSLRVPSQWQRNITYKSNPNRILPDSVDWREKGCVTEVKYQGSCGACWAFSAVGALEAQLKLKTGKLVSLSAQNLVDCSTEKYGNKGCNGGFMTTAFQYIIDNKGIDSDASYPYKAMDQKCQYDSKYRAATCSKYTELPYGREDVLKEAVANKGPVSVGVDARHPSFFLYRSGVYYEPSCTQNVNHGVLVVGYGDLNGKEYWLVKNSWGHNFGEEGYIRMARNKGNHCGIASFPSYPEI

SEQ ID NO: 413 - protein, 819 aa, Homo sapiens
MGSGARFPSGTLRVRWLLLLGLVGPVLGAARPGFQQTSHLSSYEIITPWRLTRERREAPRPYSKQVSYVIQAEGKEHIIHLERNKDLLPEDFVVYTYNKEGTLITDHPNIQNHCHYRGYVEGVHNSSIALSDCFGLRGLLHLENASYGIEPLQNSSHFEHIIYRMDDVYKEPLKCGVSNKDIEKETAKDEEEEPPSMTQLLRRRRAVLPQTRYVELFIVVDKERYDMMGRNQTAVREEMILLANYLDSMYIMLNIRIVLVGLEIWTNGNLINIVGGAGDVLGNFVQWREKFLITRRRHDSAQLVLKKGFGGTAGMAFVGTVCSRSHAGGINVFGQITVETFASIVAHELGHNLGMNHDDGRDCSCGAKSCIMNSGASGSRNFSSCSAEDFEKLTLNKGGNCLLNIPKPDEAYSAPSCGNKLVDAGEECDCGTPKECELDPCCEGSTCKLKSFAECAYGDCCKDCRFLPGGTLCRGKTSECDVPEYCNGSSQFCQPDVFIQNGYPCQNNKAYCYNGMCQYYDAQCQVIFGSKAKAAPKDCFIEVNSKGDRFGNCGFSGNEYKKCATGNALCGKLQCENVQEIPVFGIVPAIIQTPSRGTKCWGVDFQLGSDVPDPGMVNEGTKCGAGKICRNFQCVDASVLNYDCDVQKKCHGHGVCNSNKNCHCENGWAPPNCETKGYGGSVDSGPTYNEMNTALRDGLLVFFFLIVPLIVCAIFIFIKRDQLWRSYFRKKRSQTYESDGKNQANPSRQPGSVPRHVSPVTPPREVPIYANRFAVPTYAAKQPQQFPSRPPPPQPKVSSQGNLIPARPAPAPPLYSSLT

SEQ ID NO: 414 - protein, 93 aa, Homo sapiens
MLTELEKALNSIIDVYHKYSLIKGNFHAVYRDDLKKLLETECPQYIRKKGADVWFKELDINTDGAVNFQEFLILVIKMGVAAHKKSHEESHKE

SEQ ID NO: 415 - protein, 144 aa, Homo sapiens
MPKNKGKGGKNRRRGKNENESEKRELVFKEDGQEYAQVIKMLGNGRLEAMCFDGVKRLCHIRGKLRKKVWINTSDIILVGLRDYQDNKADVILKYNADEARSLKAYGELPEHAKINETDTFGPGDDDEIQFDDIGDDDEDIDDI

SEQ ID NO: 416 - protein, 277 aa, Homo sapiens
MSAQAAKVSKKELNSNHDGADETSEKEQQEAIEHIDEVQNEIDRLNEQASEEILKVEQKYNKLRQPFFQKRSELIAKIPNFWVTTFVNHPQVSALLGEEDEEALHYLTRVEVTEFEDIKSGYRIDFYFDENPYFENKVLSKEFHLNESGDPSSKSTEIKWKSGKDLTKRSSQTQNKASRKRQHEEPESFFTWFTDHSDAGADELGEVIKDDIWPNPLQYYLVPDMDDEEGEGEEDDDDDEEEEGLEDIDEEGDEDEGEEDEDDDEGEEGEEDEGEDD

SEQ ID NO: 417 - protein, 2261 aa, Homo sapiens
MACWPQLRLLLWKNLTFRRRQTCQLLLEVAWPLFIFLILISVRLSYPPYEQHECHFPNKAMPSAGTLPWVQGIICNANNPCFRYPTPGEAPGVVGNFNKSIVARLFSDARRLLLYSQKDTSMKDMRKVLRTLQQIKKSSSNLKLQDFLVDNETFSGFLYHNLSLPKSTVDKMLRADVILHKVFLQGYQLHLTSLCNGSKSEEMIQLGDQEVSELCGLPREKLAAAERVLRSNMDILKPILRTLNSTSPFPSKELAEATKTLLHSLGTLAQELFSMRSWSDMRQEVMFLTNVNSSSSSTQIYQAVSRIVCGHPEGGGLKIKSLNWYEDNNYKALFGGNGTEEDAETFYDNSTTPYCNDLMKNLESSPLSRIIWKALKPLLVGKILYTPDTPATRQVMAEVNKTFQELAVFHDLEGMWEELSPKIWTFMENSQEMDLVRMLLDSRDNDHFWEQQLDGLDWTAQDIVAFLAKHPEDVQSSNGSVYTWREAFNETNQAIRTISRFMECVNLNKLEPIATEVWLINKSMELLDERKFWAGIVFTGITPGSIELPHHVKYKIRMDIDNVERTNKIKDGYWDPGPRADPFEDMRYVWGGFAYLQDVVEQAIIRVLTGTEKKTGVYMQQMPYPCYVDDIFLRVMSRSMPLFMTLAWIYSVAVIIKGIVYEKEARLKETMRIMGLDNSILWFSWFISSLIPLLVSAGLLVVILKLGNLLPYSDPSVVFVFLSVFAVVTILQCFLISTLFSRANLAAACGGIIYFTLYLPYVLCVAWQDYVGFTLKIFASLLSPVAFGFGCEYFALFEEQGIGVQWDNLFESPVEEDGFNLTTSVSMMLFDTFLYGVMTWYIEAVFPGQYGIPRPWYFPCTKSYWFGEESDEKSHPGSNQKRISEICMEEEPTHLKLGVSIQNLVKVYRDGMKVAVDGLALNFYEGQITSFLGHNGAGKTTTMSILTGLFPPTSGTAYILGKDIRSEMSTIRQNLGVCPQHNVLFDMLTVEEHIWFYARLKGLSEKHVKAEMEQMALDVGLPSSKLKSKTSQLSGGMQRKLSVALAFVGGSKVVILDEPTAGVDPYSRRGIWELLLKYRQGRTIILSTHHMDEADVLGDRIAIISHGKLCCVGSSLFLKNQLGTGYYLTLVKKDVESSLSSCRNSSSTVSYLKKEDSVSQSSSDAGLGSDHESDTLTIDVSAISNLIRKHVSEARLVEDIGHELTYVLPYEAAKEGAFVELFHEIDDRLSDLGISSYGISETTLEEIFLKVAEESGVDAETSDGTLPARRNRRAFGDKQSCLRPFTEDDAADPNDSDIDPESRETDLLSGMDGKGSYQVKGWKLTQQQFVALLWKRLLIARRSRKGFFAQIVLPAVFVCIALVFSLIVPPFGKYPSLELQPWMYNEQYTFVSNDAPEDTGTLELLNALTKDPGFGTRCMEGNPIPDTPCQAGEEEWTTAPVPQTIMDLFQNGNWTMQNPSPACQCSSDKIKKMLPVCPPGAGGLPPPQRKQNTADILQDLTGRNISDYLVKTYVQIIAKSLKNKIWVNEFRYGGFSLGVSNTQALPPSQEVNDAIKQMKKHLKLAKDSSADRFLNSLGRFMTGLDTKNNVKVWFNNKGWHAISSFLNVINNAILRANLQKGENPSHYGITAFNHPLNLTKQQLSEVALMTTSVDVLVSICVIFAMSFVPASFVVFLIQERVSKAKHLQFISGVKPVIYWLSNFVWDMCNYVVPATLVIIIFICFQQKSYVSSTNLPVLALLLLLYGWSITPLMYPASFVFKIPSTAYVVLTSVNLFIGINGSVATFVLELFTDNKLNNINDILKSVFLIFPHFCLGRGLIDMVKNQAMADALERFGENRFVSPLSWDLVGRNLFAMAVEGVVFFLITVLIQYRFFIRPRPVNAKLSPLNDEDEDVRRERQRILDGGGQNDILEIKELTKIYRRKRKPAVDRICVGIPPGECFGLLGVNGAGKSSTFKMLTGDTTVTRGDAFLNKNSILSNIHEVHQNMGYCPQFDAITELLTGREHVEFFALLRGVPEKEVGKVGEWAIRKLGLVKYGEKYAGNYSGGNKRKLSTAMALIGGPPVVFLDEPTTGMDPKARRFLWNCALSVVKEGRSVVLTSHSMEECEALCTRMAIMVNGRFRCLGSVQHLKNRFGDGYTIVVRIAGSNPDLKPVQDFFGLAFPGSVLKEKHRNMLQYQLPSSLSSLARIFSILSQSKKRLHIEDYSVSQTTLDQVFVNFAKDQSDDDHLKDLSLHKNQTVVDVAVLTSFLQDEKVKESYV

SEQ ID NO: 418 - protein, 1721 aa, Homo sapiens
MAQFPTPFGGSLDIWAITVEERAKHDQQFHSLKPISGFITGDQARNFFFQSGLPQPVLAQIWALADMNNDGRMDQVEFSIAMKLIKLKLQGYQLPSALPPVMKQQPVAISSAPPFGMGGIASMPPLTAVAPVPMGSIPVVGMSPTLVSSVPTAAVPPLANGAPPVIQPLPAFAHPAATLPKSSSFSRSGPGSQLNTKLQKAQSFDVASVPPVAEWAVPQSSRLKYRQLFNSHDKTMSGHLTGPQARTILMQSSLPQAQLASIWNLSDIDQDGKLTAEEFILAMHLIDVAMSGQPLPPVLPPEYIPPSFRRVRSGSGISVISSTSVDQRLPEEPVLEDEQQQLEKKLPVTFEDKKRENFERGNLELEKRRQALLEQQRKEQERLAQLERAEQERKERERQEQERKRQLELEKQLEKQRELERQREEERRKEIERREAAKRELERQRQLEWERNRRQELLNQRNKEQEDIVVLKAKKKTLEFELEALNDKKHQLEGKLQDIRCRLTTQRQEIESTNKSRELRIAEITHLQQQLQESQQMLGRLIPEKQILNDQLKQVQQNSLHRDSLVTLKRALEAKELARQHLRDQLDEVEKETRSKLQEIDIFNNQLKELREIHNKQQLQKQKSMEAERLKQKEQERKIIELEKQKEEAQRRAQERDKQWLEHVQQEDEHQRPRKLHEEEKLKREESVKKKDGEEKGKQEAQDKLGRLFHQHQEPAKPAVQAPWSTAEKGPLTISAQENVKVVYYRALYPFESRSHDEITIQPGDIVMVKGEWVDESQTGEPGWLGGELKGKTGWFPANYAEKIPENEVPAPVKPVTDSTSAPAPKLALRETPAPLAVTSSEPSTTPNNWADFSSTWPTSTNEKPETDNWDAWAAQPSLTVPSAGQLRQRSAFTPATATGSSPSPVLGQGEKVEGLQAQALYPWRAKKDNHLNFNKNDVITVLEQQDMWWFGEVQGQKGWFPKSYVKLISGPIRKSTSMDSGSSESPASLKRVASPAAKPVVSGEEFIAMYTYESSEQGDLTFQQGDVILVTKKDGDWWTGTVGDKAGVFPSNYVRLKDSEGSGTAGKTGSLGKKPEIAQVIASYTATGPEQLTLAPGQLILIRKKNPGGWWEGELQARGKKRQIGWFPANYVKLLNPGTSKITPTEPPKSTALAAVCQVIGMYDYTAQNDDELAFNKGQIINVLNKEDPDWWKGEVNGQVGLFPSNYVKLTTDMDPSQQWCSDLHLLDMLTPTERKRQGYIHELIVTEENYVNDLQLVTEIFQKPLMESELLTEKEVAMIFVNWKELIMCNIKLLKALRVRKKMSGEKMPVKMIGDILSAQLPHMQPYIRFCSRQLNGAALIQQKTDEAPDFKEFVKRLEMDPRCKGMPLSSFILKPMQRVTRYPLIIKNILENTPENHPDHSHLKHALEKAEELCSQVNEGVREKENSDRLEWIQAHVQCEGLSEQLVFNSVTNCLGPRKFLHSGKLYKAKNNKELYGFLFNDFLLLTQITKPLGSSGTDKVFSPKSNLQYKMYKTPIFLNEVLVKLPTDPSGDEPIFHISHIDRVYTLRAESINERTAWVQKIKAASELYIETEKKKREKAYLVRSQRATGIGRLMVNVVEGIELKPCRSHGKSNPYCEVTMGSQCHITKTIQDTLNPKWNSNCQFFIRDLEQEVLCITVFERDQFSPDDFLGRTEIRVADIKKDQGSKGPVTKCLLLHEVPTGEIVVRLDLQLFDEP

SEQ ID NO: 419 - protein, 933 aa, Homo sapiens
MESCYNPGLDGIIEYDDFKLNSSIVEPKEPAPETADGPYLVIVEQPKQRGFRFRYGCEGPSHGGLPGASSEKGRKTYPTVKICNYEGPAKIEVDLVTHSDPPRAHAHSLVGKQCSELGICAVSVGPKDMTAQFNNLGVLHVTKKNMMGTMIQKLQRQRLRSRPQGLTEAEQRELEQEAKELKKVMDLSIVRLRFSAFLRASDGSFSLPLKPVTSQPIHDSKSPGASNLKISRMDKTAGSVRGGDEVYLLCDKVQKDDIEVRFYEDDENGWQAFGDFSPTDVHKQYAIVFRTPPYHKMKIERPVTVFLQLKRKRGGDVSDSKQFTYYPLVEDKEEVQRKRRKALPTFSQPFGGGSHMGGGSGGAAGGYGGAGGGGSLGFFPSSLAYSPYQSGAGPMRCYPGGGGGAQMAATVPSRDSGEEAAEPSAPSRTPQCEPQAPEMLQRAREYNARLFGLAHAAPSPTRLLRHRGRRALLAGQRHLLTAQDENGDTPLHLAIIHGQTSVIEQIVYVIHHAQDLGVVNLTNHLHQTPLHLAVITGQTSVVSFLLRVGADPALLDRHGDSAMHLALRAGAGAPELLRALLQSGAPAVPQLLHMPDFEGLYPVHLAVRARSPECLDLLVDSGAEVEATERQGGRTALHLATEMEELGLVTHLVTKLRANVNARTFAGNTPLHLAAGLGYPTLTRLLLKAGADIHAENEEPLCPLPSPPTSDSDSDSEGPEKDTRSSFRGHTPLDLTCSTLVKTLLLNAAQNTMEPPLTPPSPAGPGLSLGDTALQNLEQLLDGPEAQGSWAELAERLGLRSLVDTYRQTTSPSGSLLRSYELAGGDLAGLLEALSDMGLEEGVRLLRGPETRDKLPSTEVKEDSAYGSQSVEQEAEKLGPPPEPPGGLSHGHPQPQVTDLLPAPSPLPGPPVQRPHLFQILFNTPHPPLSWDK

SEQ ID NO: 420 - protein, 198 aa, Homo sapiens
MPLGLLWLGLALLGALHAQAQDSTSDLIPAPPLSKVPLQQNFQDNQFQGKWYVVGLAGNAILREDKDPQKMYATIYELKEDKSYNVTSVLFRKKKCDYWIRTFVPGCQPGEFTLGNIKSYPGLTSYLVRVVSTNYNQHAMVFFKKVSQNREYFKITLYGRTKELTSELKENFIRFSKYLGLPENHIVFPVPIDQCIDG

SEQ ID NO: 421 - protein, 332 aa, Homo sapiens
MGAQFSKTAAKGEAAAERPGEAAVASSPSKANGQENGHVKVNGDASPAAAESGAKEELQANGSAPAADKEEPAAAGSGAASPSSAEKGEPAAAAAPEAGASPVEKEAPAEGEAAEPGSATAAEGEAASAASSTSSPKAEDGATPSPSNETPKKKKKRFSFKKSFKLSGFSFKKNKKEAGEGGEAEAPAAEGGKDEAAGGAAAAAAEAGAASGEQAAAPGEEAAAGEEGAAGGDPQEAKPQEAAVAPEKPPASDETKAAEEPSKVEEKKAEEAGASAAACEAPSAAGPGAPPEQEAAPAEEPAAAAASSACAAPSQEAQPECSPEAPPAEAAE

SEQ ID NO: 422 - protein, 217 aa, Homo sapiens
MSKPPPKPVKPGEGGQVKVFRALYTFEPRTPDELYFEEGDIIYITDMSDTNWWKGTSKGRTGLIPSNYVAEQAESIDNPLHEAAKRGNLSWLRECLDNRVGVNGLDKAGSTALYWACHGGHKDIVEMLFTQPNIELNQQNKLGDTALHAAAWKGYADIVQLFLAKGARTDLRNIEKKLAFDMATNAACASLLKKKQGTDAVRTLSNAEDYLDDEDSD

SEQ ID NO: 423 - protein, 764 aa, Homo sapiens
MGSNLSPQLCLMPFILGLLSGGVTTTPWSLAQPQGSCSLEGVEIKGGSFRLLQEGQALEYVCPSGFYPYPVQTRTCRSTGSWSTLKTQDQKTVRKAECRAIHCPRPHDFENGEYWPRSPYYNVSDEISFHCYDGYTLRGSANRTCQVNGRWSGQTAICDNGAGYCSNPGIPIGTRKVGSQYRLEDSVTYHCSRGLTLRGSQRRTCQEGGSWSGTEPSCQDSFMYDTPQEVAEAFLSSLTETIEGVDAEDGHGPGEQQKRKIVLDPSGSMNIYLVLDGSDSIGASNFTGAKKCLVNLIEKVASYGVKPRYGLVTYATYPKIWVKVSEADSSNADWVTKQLNEINYEDHKLKSGTNTKKALQAVYSMMSWPDDVPPEGWNRTRHVIILMTDGLHNMGGDPITVIDEIRDLLYIGKDRKNPREDYLDVYVFGVGPLVNQVNINALASKKDNEQHVFKVKDMENLEDVFYQMIDESQSLSLCGMVWEHRKGTDYHKQPWQAKISVIRPSKGHESCMGAVVSEYFVLTAAHCFTVDDKEHSIKVSVGGEKRDLEIEVVLFHPNYNINGKKEAGIPEFYDYDVALIKLKNKLKYGQTIRPICLPCTEGTTRALRLPPTTTCQQQKEELLPAQDIKALFVSEEEKKLTRKEVYIKNGDKKGSCERDAQYAPGYDKVKDISEVVTPRFLCTGGVSPYADPNTCRGDSGGPLIVHKRSRFIQVGVISWGVVDVCKNQKRQKQVPAHARDFHINLFQVLPWLKEKLQDEDLGFL

SEQ ID NO: 424 - protein, 381 aa, Homo sapiens
  VARIANT 59, 300, 318, 330, 345, 352, 367, 369, 376, 378: Xaa = Any Amino Acid
MWRSLGLALALCLLPSGGTESQDQSSLCKQPPAWSIRDQDPMLNSNGSVTVVALLQASXYLCIIEASKLEDLRVKLKKEGYSNISYIVVNHQGISSRLKYTHLKNKVSEHIPVYQQEENQTDVWTLLNGSKDDFLIYDRCGRLVYHLGLPFSFLTFPYVEEAIKIAYCEKKCGNCSLTTLKDEDFCKRVSLATVDKTVETPSPHYHHEHHHNHGHQHLGSSELSENQQPGAPNAPTHPAPPGLHHHHKHKGQHRQGHPENRDMPASEDLQDLQKKLCRKRCINQLLCKLPTDSELAPRSXCCHCRHLIFEKTGSAITXQCKENLPSLCSXQGLRAEENITESCQXRLPPAAXQISQQLIPTEASASXRXKNQAKKXEXPSN

SEQ ID NO: 425 - protein, 923 aa, Homo sapiens
MERGLPLLCAVLALVLAPAGAFRNDECGDTIKIESPGYLTSPGYPHSYHPSEKCEWLIQAPDPYQRIMINFNPHFDLEDRDCKYDYVEVFDGENENGHFRGKFCGKIAPPPVVSSGPFLFIKFVSDYETHGAGFSIRYEIFKRGPECSQNYTTPSGVIKSPGFPEKYPNSLECTYIVFAPKMSEIILEFESFDLEPDSNPPGGMFCRYDRLEIWDGFPDVGPHIGRYCGQKTPGRIRSSSGILSMVFYTDSAIAKEGFSANYSVLQSSVSEDFKCMEALGMESGEIHSDQITASSQYSTNWSAERSRLNYPENGWTPGEDSYREWIQVDLGLLRFVTAVGTQGAISKETKKKYYVKTYKIDVSSNGEDWITIKEGNKPVLFQGNTNPTDVVVAVFPKPLITRFVRIKPATWETGISMRFEVYGCKITDYPCSGMLGMVSGLISDSQITSSNQGDRNWMPENIRLVTSRSGWALPPAPHSYINEWLQIDLGEEKIVRGIIIQGGKHRENKVFMRKFKIGYSNNGSDWKMIMDDSKRKAKSFEGNNNYDTPELRTFPALSTRFIRIYPERATHGGLGLRMELLGCEVEAPTAGPTTPNGNLVDECDDDQANCHSGTGDDFQLTGGTTVLATEKPTVIDSTIQSEFPTYGFNCEFGWGSHKTFCHWEHDNHVQLKWSVLTSKTGPIQDHTGDGNFIYSQADENQKGKVARLVSPVVYSQNSAHCMTFWYHMSGSHVGTLRVKLRYQKPEEYDQLVWMAIGHQGDHWKEGRVLLHKSLKLYQVIFEGEIGKGNLGGIAVDDISINNHISQEDCAKPADLDKKNPEIKIDETGSTPGYEGEGEGDKNISRKPGNVLKTLEPILITIIAMSALGVLLGAVCGVVLYCACWHNGMSERNLSALENYNFELVDGVKLKKDKLNTQSTYSEA

SEQ ID NO: 426 - protein, 286 aa, Homo sapiens
MADFDDRVSDEEKVRIAAKFITHAPPGEFNEVFNDVRLLLNNDNLLREGAAHAFAQYNMDQFTPVKIEGYEDQVLITEHGDLGNSRFLDPRNKISFKFDHLRKEASDPQPEEADGGLKSWRESCDSALRAYVKDHYSNGFCTVYAKTIDGQQTIIACIESHQFQPKNFWNGRWRSEWKFTITPPTAQVVGVLKIQVHYYEDGNVQLVSHKDVQDSLTVSNEAQTAKEFIKIIENAENEYQTAISENYQTMSDTTFKALRRQLPVTRTKIDWNKILSYKIGKEMQNA

SEQ ID NO: 427 - protein, 578 aa, Homo sapiens
MNISVDLETNYAELVLDVGRVTLGENSRKKMKDCKLRKKQNESVSRAMCALLNSGGGVIKAEIENEDYSYTKDGIGLDLENSFSNILLFVPEYLDFMQNGNYFLIFVKSWSLNTSGLRITTLSSNLYKRDITSAKVMNATAALEFLKDMKKTRGRLYLRPELLAKRPCVDIQEENNMKALAGVFFDRTELDRKEKLTFTESTHVEIKNFSTEKLLQRIKEILPQYVSAFANTDGGYLFIGLNEDKEIIGFKAEMSDLDDLEREIEKSIRKMPVHHFCMEKKKINYSCKFLGVYDKGSLCGYVCALRVERFCCAVFAKEPDSWHVKDNRVMQLTRKEWIQFMVEAEPKFSSSYEEVISQINASLPAPHSWPLLEWQRQRHHCPGLSGRITYTPENLCRKLFLQHEGLKQLICEEMDSVRKGSLIFSRSWSVDLGLQENHKVLCDALLISQDSPPVLYTFHMVQDEEFKGYSTQTALTLKQKLAKIGGYTKKVCVMTKIFYLSPEGMTSCQYDLRSQVIYPESYYFTRRKYLLKALFKALKRLKSLRDQFSFAENLYQIIGIDCFQKNDKKMFKSCRRLT

SEQ ID NO: 428 - protein, 318 aa, Homo sapiens
MAAQGCAASRLLQLLLQLLLLLLLLAAGGARARWRAEGTSAHLRDIFLGRCAEYRALLSPEQRNKNCTAIWEAFKVALDKDPCSVLPSDYDLFINLSRHSIPRDKSLFWENSHLLVNSFADNTRRFMPLSDVLYGRVADFLSWCRQKNDSGLDYQSCPTSEDCENNPVDSFWKRASIQYSKDSSGVIHVMLNGSEPTGAYPIKGFFADYEIPNLQKEKITRIEIWVMHEIGGPNVESCGEGSMKVLEKRLKDMGFQYSCINDYRPVKLLQCVDHSTHPDCALKSAAAATQRKAPSLYTEQRAGLIIPLFLVLASRTQL

SEQ ID NO: 429 - protein, 99 aa, Homo sapiens
MKASAALLCLLLTAAAFSPQGLAQPVGINTSTTCCYRFINKKIPKQRLESYRRTTSSHCPREAVIFKTKLDKEICADPTQKWVQDFMKHLDKKTQTPKL

SEQ ID NO: 430 - protein, 92 aa, Homo sapiens
MKLCVTVLSLLMLVAAFCSPALSAPMGSDPPTACCFSYTARKLPRNFVVDYYETSSLCSQPAVVFQTKRSKQVCADPSESWVQEYVYDLELN

SEQ ID NO: 431 - protein, 533 aa, Homo sapiens
MALRNVPFRSEVLGWDPDSLADYFKKLNYKDCEKAVKKYHIDGARFLNLTENDIQKFPKLRVPILSKLSQEINKNEERRSIFTRKPQVPRFPEETESHEEDNGGWSSFEEDDYESPNDDQDGEDDGDYESPNEEEEAPVEDDADYEPPPSNDEEALQNSILPAKPFPNSNSMYIDRPPSGKTPQQPPVPPQRPMAALPPPPAGRNHSPLPPPQTNHEEPSRSRNHKTAKLPAPSIDRSTKPPLDRSLAPFDREPFTLGKKPPFSDKPSIPAGRSLGEHLPKIQKPPLPPTTERHERSSPLPGKKPPVPKHGWGPDRRENDEDDVHQRPLPQPALLPMSSNTFPSRSTKPSPMNPLPSSHMPGAFSESNSSFPQSASLPPYFSQGPSNRPPIRAEGRNFPLPLPNKPRPPSPAEEENSLNEEWYVSYITRPEAEAALRKINQDGTFLVRDSSKKTTTNPYVLMVLYKDKVYNIQIRYQKESQVYLLGTGLRGKEDFLSVSDIIDYFRKMPLLLIDGKNRGSRYQCTLTHAAGYP

SEQ ID NO: 432 - protein, 352 aa, Homo sapiens [sequence omitted]

SEQ ID NO: 433 - protein, 446 aa, Homo sapiens
MDEGPVDLRTRPKAAGLPGAALPLRKRPLRAPSPEPAAPRGAAGLVVPLDPLRGGCDLPAVPGPPHGLARPEALYYPGALLPLYPTRAMGSPFPLVNLPTPLYPMMCPMEHPLSADIAMATRADEDGDTPLHIAVVQGNLPAVHRLVNLFQQGGRELDIYNNLRQTPLHLAVITTLPSVVRLLVTAGASPMALDRHGQTAAHLACEHRSPTCLRALLDSAAPGTLDLEARNYDGLTALHVAVNTECQETVQLLLERGADIDAVDIKSGRSPLIHAVENNSLSMVQLLLQHGANVNAQMYSGSSALHSASGRGLLPLVRTLVRSGADSSLKNCHNDTPLMVARSRRVIDILRGKATRPASTSQPDPSPDRSANTSPESSSRLSSNGLLSASPSSSPSQSPPRDPPGFPMAPPNFFLPSPSPPAFLPFAGVLRGPGRPVPPSPAPGGS

SEQ ID NO: 434 - protein, 757 aa, Homo sapiens
MVPDTACVLLLTLAALGASGQGQSPLGSDLGPQMLRELQETNAALQDVRDWLRQQVREITFLKNTVMECDACGMQQSVRTGLPSVRPLLHCAPGFCFPGVACIQTESGGRCGPCPAGFTGNGSHCTDVNECNAHPCFPRVRCINTSPGFRCEACPPGYSGPTHQGVGLAFAKANKQVCTDINECETGQHNCVPNSVCINTRGSFQCGPCQPGFVGDQASGCQRGAQRFCPDGSPSECHEHADCVLERDGSRSCVCRVGWAGNGILCGRDTDLDGFPDEKLRCPEPQCRKDNCVTVPNSGQEDVDRDGIGDACDPDADGDGVPNEKDNCPLVRNPDQRNTDEDKWGDACDNCRSQKNDDQKDTDQDGRGDACDDDIDGDRIRNQADNCPRVPNSDQKDSDGDGIGDACDNCPQKSNPDQADVDHDFVGDACDSDQDQDGDGHQDSRDNCPTVPNSAQEDSDHDGQGDACDDDDDNDGVPDSRDNCRLVPNPGQEDADRDGVGDVCQDDFDADKVVDKIDVCPENAEVTLTDFRAFQTVVLDPEGDAQIDPNWVVLNQGREIVQTMNSDPGLAVGYTAFNGVDFEGTFHVNTVTDDDYAGFIFGYQDSSSFYVVMWKQMEQTYWQANPFRAVAEPGIQLKAVKSSTGPGEQLRNALWHTGDTESQVRLLWKDPRNVGWKDKKSYRWFLQHRPQVGYIRVRFYEGPELVADSNVVLDTTMRGGRLGVFCFSQENIIWANLRYRCNDTIPEDYETHQLRQA

SEQ ID NO: 435 - protein, 524 aa, Homo sapiens
MISPFLVLAIGTCLTNSLVPEKEKDPKYWRDQAQETLKYALELQKLNTNVAKNVIMFLGDGMGVSTVTAARILKGQLHHNPGEETRLEMDKFPFVALSKTYNTNAQVPDSAGTATAYLCGVKANEGTVGVSAATERSRCNTTQGNEVTSILRWAKDAGKSVGIVTTTRVNHATPSAAYAHSADRDWYSDNEMPPEALSQGCKDIAYQLMHNIRDIDVIMGGGRKYMYPKNKTDVEYESDEKARGTRLDGLDLVDTWKSFKPRYKHSHFIWNRTELLTLDPHNVDYLLGLFEPGDMQYELNRNNVTDPSLSEMVVVAIQILRKNPKGFFLLVEGGRIDHGHHEGKAKQALHEAVEMDRAIGQAGSLTSSEDTLTVVTADHSHVFTFGGYTPRGNSIFGLAPMLSDTDKKPFTAILYGNGPGYKVVGGERENVSMVDYAHNNYQAQSPVPLRHETHGGEDVAVFSKGPMAHLLHGVHEQNYVPHVMAYAACIGANLGHCAPASSAGSLAAGPLLLALALYPLSVLF

SEQ ID NO: 436 - protein, 2355 aa, Homo sapiens
MLRGPGPGLLLLAVQCLGTAVPSTGASKSKRQAQQMVQPQSPVAVSQSKPGCYDNGKHYQINQQWERTYLGNALVCTCYGGSRGFNCESKPEAEETCFDKYTGNTYRVGDTYERPKDSMIWDCTCIGAGRGRISCTIANRCHEGGQSYKIGDTWRRPHETGGYMLECVCLGNGKGEWTCKPIAEKCFDHAAGTSYVVGETWEKPYQGWMMVDCTCLGEGSGRITCTSRNRCNDQDTRTSYRIGDTWSKKDNRGNLLQCICTGNGRGEWKCERHTSVQTTSSGSGPFTDVRAAVYQPQPHPQPPPYGHCVTDSGVVYSVGMQWLKTQGNKQMLCTCLGNGVSCQETAVTQTYGGNSNGEPCVLPFTYNGRTFYSCTTEGRQDGHLWCSTTSNYEQDQKYSFCTDHTVLVQTRGGNSNGALCHFPFLYNNHNYTDCTSEGRRDNMKWCGTTQNYDADQKFGFCPMAAHEEICTTNEGVMYRIGDQWDKQHDMGHMMRCTCVGNGRGEWTCIAYSQLRDQCIVDDITYNVNDTFHKRHEEGHMLNCTCFGQGRGRWKCDPVDQCQDSETGTFYQIGDSWEKYVHGVRYQCYCYGRGIGEWHCQPLQTYPSSSGPVEVFITETPSQPNSHPIQWNAPQPSHISKYILRWRPKNSVGRWKEATIPGHLNSYTIKGLKPGVVYEGQLISIQQYGHQEVTRFDFTTTSTSTPVTSNTVTGETTPFSPLVATSESVTEITASSFVVSWVSASDTVSGFRVEYELSEEGDEPQYLDLPSTATSVNIPDLLPGRKYIVNVYQISEDGEQSLILSTSQTTAPDAPPDPTVDQVDDTSIVVRWSRPQAPITGYRIVYSPSVEGSSTELNLPETANSVTLSDLQPGVQYNITIYAVEENQESTPVVIQQETTGTPRSDTVPSPRDLQFVEVTDVKVTIMWTPPESAVTGYRVDVIPVNLPGEHGQRLPISRNTFAEVTGLSPGVTYYFKVFAVSHGRESKPLTAQQTTKLDAPTNLQFVNETDSTVLVRWTPPRAQITGYRLTVGLTRRGQPRQYNVGPSVSKYPLRNLQPASEYTVSLVAIKGNQESPKATGVFTTLQPGSSIPPYNTEVTETTIVITWTPAPRIGFKLGVRPSQGGEAPREVTSDSGSIVVSGLTPGVEYVYTIQVLRDGQERDAPIVNKVVTPLSPPTNLHLEANPDTGVLTVSWERSTTPDITGYRITTTPTNGQQGNSLEEVVHADQSSCTFDNLSPGLEYNVSVYTVKDDKESVPISDTIIPAVPPPTDLRFTNIGPDTMRVTWAPPPSIDLTNFLVRYSPVKNEEDVAELSISPSDNAVVLTNLLPGTEYVVSVSSVYEQHESTPLRGRQKTGLDSPTGIDFSDITANSFTVHWIAPRATITGYRIRHHPEHFSGRPREDRVPHSRNSITLTNLTPGTEYVVSIVALNGREESPLLIGQQSTVSDVPRDLEVVAATPTSLLISWDAPAVTVRYYRITYGETGGNSPVQEFTVPGSKSTATISGLKPGVDYTITVYAVTGRGDSPASSKPISINYRTEIDKPSQMQVTDVQDNSISVKWLPSSSPVTGYRVTTTPKNGPGPTKTKTAGPDQTEMTIEGLQPTVEYVVSVYAQNPSGESQPLVQTAVTNIDRPKGLAFTDVDVDSIKIAWESPQGQVSRYRVTYSSPEDGIHELFPAPDGEEDTAELQGLRPGSEYTVSVVALHDDMESQPLIGTQSTAIPAPTDLKFTQVTPTSLSAQWTPPNVQLTGYRVRVTPKEKTGPMKEINLAPDSSSVVVSGLMVATKYEVSVYALKDTLTSRPAQGVVTTLENVSPPRRARVTDATETTITISWRTKTETITGFQVDAVPANGQTPIQRTIKPDVRSYTITGLQPGTDYKIYLYTLNDNARSSPVVIDASTAIDAPSNLRFLATTPNSLLVSWQPPRARITGYIIKYEKPGSPPREVVPRPRPGVTEATITGLEPGTEYTIYVIALKNNQKSEPLIGRKKTDELPQLVTLPHPNLHGPEILDVPSTVQKTPFVTHPGYDTGNGIQLPGTSGQQPSVGQQMIFEEHGFRRTTPPTTATPIRHRPRPYPPNVGQEALSQTTISWAPFQDTSEYIISCHPVGTDEEPLQFRVPGTSTSATLTGLTRGATYNIIVEALKDQQRHKVREEVVTVGNSVNEGLNQPTDDSCFDPYTVSHYAVGDEWERMSESGFKLLCQCLGFGSGHFRCDSSRWCHDNGVNYKIGEKWDRQGENGQMMSCTCLGNGKGEFKCDPHEATCYDDGKTYHVGEQWQKEYLGAICSCTCFGGQRGWRCDNCRRPGGEPSPEGTTGQSYNQYSQRYHQRTNTNVNCPIECFMPLDVQADREDSRE

SEQ ID NO: 437 - protein, 599 aa, Homo sapiens; identical to SEQ ID NO: 375

SEQ ID NO: 438 - protein, 376 aa, Homo sapiens
MQWASLLLLAGLFSLSQAQYEDDPHWWFHYLRSQQSTYYDPYDPYPYETYEPYPYGVDEGPAYTYGSPSPPDPRDCPQECDCPPNFLTAMYCDNRNLKYLPFVPSRMKYVYFQNNQITSIQEGVFDNATGLLWIALHGNQITSDKVGRKVFSKLRHLERLYLDHNNLTRMPGPLPRSLRELHLDHNQISRVPNNALEGLENLTALYLQHDEIQEVGSSMRGLRSLILLDLSYNHLRKVPDGLPSALEQLYMEHNNVYTVPDSYFRGAPKLLYVRLSHNSLTNNGLASNTFNSSSLLELDLSYNQLQKIPPVNTNLENLYLQGNRINEFSISSFCTVVDVVNFSKLQVVRLDGNEIKRSAMPADAPLCLRLASLIEI

SEQ ID NO: 439 - protein, 191 aa, Homo sapiens
MGKKTKRTADSSSSEDEEEYVVEKVLDRRVVKGQVEYLLKWKGFSEEHNTWEPEKNLDCPELISEFMKKYKKMKEGENNKPREKSESNKRKSNFSNSADDIKSKKKREQSNDIARGFERGLEPEKIIGATDSCGDLMFLMKWKDTDEADLVLAKEANVKCPQIVIAFYEERLTWHAYPEDAENKEKETAKS

SEQ ID NO: 440 - protein, 269 aa, Homo sapiens
MASEFKKKLFWRAVVAEFLATTLFVFISIGSALGFKYPVGNNQTAVQDNVKVSLAFGLSIATLAQSVGHISGAHLNPAVTLGLLLSCQISIFRALMYIIAQCVGAIVATAILSGITSSLTGNSLGRNDLADGVNSGQGLGIEIIGTLQLVLCVLATTDRRRRDLGGSAPLAIGLSVALGHLLAIDYTGCGINPARSFGSAVITHNFSNHWIFWVGPFIGGALAVLIYDFILAPRSSDLTDRVKVWTSGQVEEYDLDADDINSRVEMKPK

SEQ ID NO: 441 - protein, 159 aa, Homo sapiens
MTLEEVRGQDTVPESTARMQGAGKALHELLLSAQRQGCLTAGVYESAKVLNVDPDNVTFCVLAAGEEDEGDIALQIHFTLIQAFCCENDIDIVRVGDVQRLAAIVGAGEEAGAPGDLHCILISNPNEDAWKDPALEKLSLFCEESRSVNDWVPSITLPE

SEQ ID NO: 442 - protein, 1010 aa, Homo sapiens
RAARALLPLLLQACWTAAQDEPETPRAVAFQDCPVDLFFVLDTSESVALRLKPYGALVDVKSFTKRFIDNLRDRYYRCDRNLVWNAGALHYSDEVEIIQGLTRMPGGRDALKSSVDAVYFGKGTYTDCAIKKGLEQLLVGGSHLKENKYLIVVTDGHPLEGYKEPCGGLEDAVNEAKLGVKVFSVAITPDHLEPRLSIIATDHTYRRNFTAADWGQSRDAEEAISQTIDTIVDMIKNVEQVCCSFECQPARGPPGLRGDPGFEGERGKPGLPGEKGEAGDPGRPGDLGPVGYQGMGEKGSRGEKGSRGPKGYKGEKGKRGIDGVDGVKGEMGYPGLPGCKGSPGFDGIQGPPGPGDPGAFGLKGEKGEPGADGEAGRPGARGPSGDEGPAGEPGPPGEKGEAGDEGNPGPDGAGERGGPGERGPRGTPGPRGPRGDPGEAGPQGDQGREGPVGVPGDPGEAGPIGPKGYRGDGPPGSEGARGAPGPAGPPGDPGLMGERGEDGPAGNGTEGFPGFPGYPGNRGAPGINGTKYPGLKGDEGEAGDPGDDNNDIAPRGVKGAKGYRGPEGPQGPPGHQGPPGPDECEILDIIKMCSCCECKCGPIDLLFVLDSSESIGLQNFEIAKDFVVKVIDRLSRDELVKFEPGQSYAVVQYSHSQMQEHVSLRSPSIRNVQELKEAIKSLQWMAGGTFTGEALQYTRDQLLPPSPNRIALVITDGRSDTQRDTTPLNVLCSPGIQVVSVGIKDVFDFIPGSDQLNVISCQGLAPSGRPGLSLVKENYAELLEDAFLKNVTAQICIDKKCPDYTCPITFSSPADITILLDGSASVSHNFDTTKRFAKRLAERFLTAGRTDPAHDVRVAVVQYSGTGQQRPERASLQFLQNYTALSAVDAMDFINDATDVNDALGYVTRFYREASSGAAKKRLLLFSDGNSQGATPAAIEKAVQAQRAGIEIFVVVVGRQVNEPHIRVLVTGKTAEYDVAYGESHLFRVPSYQALLRGVFHQTSRKVALG

SEQ ID NO: 443 - protein, 1629 aa, Homo sapiens
MERCSRCHRLLLLLPLVLGLSAAPGWAGAPPVDVLRALRFPSLPDGVRRAKGICPADVAYRVARPAQLSAPTRQLFPGGFPKDFSLLTVVRTRPGLQAPLLTLYSAQGVRQLGLELGRPVRFLYEDQTGRPQPPSQPVFRGLSLADGKWHRVAVAVKGQSVTLIVDCKKRVTRPLPRSARPVLDTHGVIIFGARILDEEVFEGDVQELAIVPGVQAAYESCEQKELECEGGQRERPQNQQPHRAQRSPQQQPSRLHRPQNQEPQSQAAHGPRGLKGEKGEPAVLEPGMLVEGPPGPEGPAGLIGPPGIQGNPGPVGDPGERGPPGRAGLPGSDGAPGPPGTSLMLPFRFGSGGGDKGPVVAAQEAQAQAILQQARLALRGPPGPMGYTGRPGPLGQPGSPGLKGESGDLGPQGPRGPQGLTGSLGKAGRRGRAGADGARGMPGDPGVKGDRGFDGLPGLPGEKGHRGDTGAQGLPGPPGEDGERGDDGEIGPRGLPGESGPRGLLGPKGPPGIPGPPGVRGMDGPQGPKGSLGPQGEPGPPGQQGTPGTQGLPGPQGAIGPHGEKGPQGKPGLPGMPGSDGPPGHPGKEGPPGTKGNQGPSGPQGPLGYPGPRGVKGVDGIRGLKGHKGEKGEDGFPGFKGDIGVKGDRGEVGVPGSRGEDGPEGPKGRTGPTGDPGPPGLMGEKGKLGVPGLPGYPGRQGPKGSLGFPGFPGASGEKGARGLSGKSGPRGERGPTGPRGQRGPRGATGKSGAKGTSGGDGPHGPPGERGLPGPQGPNGFPGPKGPPGPPGKDGLPGHPGQRGEVGFQGKTGPPGPPGVVGPQGAAGETGPMGERGHPGPPGPPGEQGLPGTAGKEGTKGDPGPPGAPGKDGPAGLRGFPGERGLPGTAGGPGLKGNEGPSGPPGPAGSPGERGAAGSGGPIGRQGRPGPQGPPGAAGEKGVPGEKGPIGPTGRDGVQGPVGLPGPAGPPGVAGEDGDKGEVGDPGQKGTKGNKGEHGPPGPPGPIGPVGQPGAAGADGEPGARGPQGHFGAKGDEGTRGFNGPPGPIGLQGLPGPSGEKGETGDVGPMGPPGPPGPRGPAGPNGADGPQGPPGGVGNLGPPGEKGEPGESGSPGIQGEPGVKGPRGERGEKGESGQPGEPGPPGAKGPQGDDGPKGNPGPVGFPGDPGPPGEGGPRGQDGAKGDRGEDGEPGQPGSPGPTGENGPPGPLGKRGPAGSPGSEGRQGGKGAKGDPGAIGAPGKTGPVGPAGPAGKPGPDGLRGLPGSVGQQGRPGATGQAGPPGPVGPPGLPGLRGDAGAKGEKGHPGLIGLIGPPGEQGEKGDRGLPGPQGSPGQKGEMGIPGASGPIGPGGPPGLPGPAGPKGAKGATGPGGPKGEKGVQGPPGHPGPPGEVIQPLPIQMPKKTRRSVDGSRLMQEDEAIPTGGAPGSPGGLEEIFGSLDSLREEIEQMRRPTGTQDSPARTCQDLKLCHPELPDGEYWVDPNQGCARDAFRVFCNFTAGGETCVTPRDDVTQFSYVDSEGSPVGVVQLTFLRLLSVSAHQDVSYPCSGAARDGPLRLRGANEDELSPETSPYVKEFRDGCQTQQGRTVLEVRTPVLEQLPVLDASFSDLGAPPRRGGVLLGPVCFMG

SEQ ID NO: 444 - protein, 956 aa, Homo sapiens
METQELRGALALLLLCFFTSASQDLQVIDLLTVGESRQMVAVAEKIRTALLTAGDIYLLSTFRLPPKQGGVLFGLYSRQDNTRWLEASVVGKINKVLVRYQREDGKVHAVNLQQAGLADGRTHTVLLRLRGPSRPSPALHLYVDCKLGDQHAGLPALAPIPPAEVDGLEIRTGQKAYLRMQGFVESMKIILGGSMARVGALSECPFQGDESIHSAVTNALHSILGEQTKALVTQLTLFNQILVELRDDIRDQVKEMSLIRNTIMECQVCGFHEQRSHCSPNPCFRGVDCMEVYEYPGYRCGPCPPGLQGNGTHCSDINECAHADPCFPGSSCINTMPGFHCEACPRGYKGTQVSGVGIDYARASKQVCNDIDECNDGNNGGCDPNSICTNTVGSFKCGPCRLGFLGNQSQGCLPARTCHSPAHSPCHIHAHCLFERNGAVSCQCNVGWAGNGNVCGTDTDIDGYPDQALPCMDNNKHCKQDNCLLTPNSGQEDADNDGVGDQCDDDADGDGIKNVEDNCRLFPNKDQQNSDTDSFGDACDNCPNVPNNDQKDTDGNGEGDACDNDVDGDGIPNGLDNCPKVPNPLQTDRDEDGVGDACDSCPEMSNPTQTDADSDLVGDVCDTNEDSDGDGHQDTKDNCPQLPNSSQLDSDNDGLGDECDGDDDNDGIPDYVPPGPDNCRLVPNPNQKDSDGNGVGDVCEDDFDNDAVVDPLDVCPESAEVTLTDFRAYQTVVLDPEGDAQIDPNWVVLNQGMEIVQTMNSDPGLAVGYTAFNGVDFEGTFHVNTVTDDDYAGFLFSYQDSGRFYVVMWKQTEQTYWQATPFRAVAQPGLQLKAVTSVSGPGEHLRNALWHTGHTPDQVRLLWTDPRNVGWRDKTSYRWQLLHRPQVGYIRVKLYEGPQLVADSGVIIDTSMRGGRLGVFCFSQENIIWSNLQYRCNDTVPEDFEPFRRQLLQGRV

SEQ ID NO: 445 - protein, 350 aa, Homo sapiens
MQRLGATLLCLLLAAAVPTAPAPAPTATSAPVKPGPALSYPQEEATLNEMFREVEELMEDTQHKLRSAVEEMEAEEAAAKASSEVNLANLPPSYHNETNTDTKVGNNTIHVHREIHKITNNQTGQMVFSETVITSVGDEEGRRSHECIIDEDCGPSMYCQFASFQYTCQPCRGQRMLCTRDSECCGDQLCVWGHCTKMATRGSNGTICDNQRDCQPGLCCAFQRGLLFPVCTPLPVEGELCHDPASRLLDLITWELEPDGALDRCPCASGLLCQPHSHSLVYVCKPTFVGSRDQDGEILLPREVPDEYEVGSFMEEVRQELEDLERSLTEEMALGEPAAAAAALLGGEEI

SEQ ID NO: 446 - protein, 142 aa, Homo sapiens
MVLSPADKTNVKAAWGKVGAHAGEYGAEALERMFLSFPTTKTYFPHFDLSHGSAQVKGHGKKVADALTNAVAHVDDMPNALSALSDLHAHKLRVDPVNFKLLSHCLLVTLAAHLPAEFTPAVHASLDKFLASVSTVLTSKYR

SEQ ID NO: 447 - protein, 428 aa, Homo sapiens
MQELHLLWWALLLGLAQACPEPCDCGEKYGFQIADCAYRDLESVPPGFPANVTTLSLSANRLPGLPEGAFREVPLLQSLWLAHNEIRTVAAGALASLSHLKSLDLSHNLISDFAWSDLHNLSALQLLKMDSNELTFIPRDAFRSLRALRSLQLNHNRLHTLAEGTFTPLTALSHLQINENPFDCTCGIVWLKTWALTTAVSIPEQDNIACTSPHVLKGTPLSRLPPLPCSAPSVQLSYQPSQDGAELRPGFVLALHCDVDGQPAPQLHWHIQIPSGIVEITSPNVGTDGRALPGTPVASSQPRFQAFANGSLLIPDFGKLEEGTYSCLATNELGSAESSVDVALATPGEGGEDTLGRRFHGKAVEGKGCYTVDNEVQPSGPEDNVVIIYLSRAGNPEAAVAEGVPGQLPPGLLLLGQSLLLFFFLTSF

SEQ ID NO: 448 - protein, 463 aa, Homo sapiens
MGKEKTHINIVVIGHVDSGKSTTTGHLIYKCGGIDKRTIEKFEKEAAEMGKGSFKYAWVLDKLKAERERGITIDISLWKFETTKYYITIIDAPGHRDFIKNMITGTSQADCAVLIVAAGVGEFEAGISKNGQTREHALLAYTLGVKQLIVGVNKMDSTEPAYSEKRYDEIVKEVSAYIKKIGYNPATVPFVPISGWHGDNMLEPSPNMPWFKGWKVERKEGNASGVSLLEALDTILPPTRPTDKPLRLPLQDVYKIGGIGTVPVGRVETGILRPGMVVTFAPVNITTEVKSVEMHHEALSEALPGDNVGFNVKNVSVKDIRRGNVCGDSKSDPPQEAAQFTSQVIILNHPGQISAGYSPVIDCHTAHIACKFAELKEKIDRRSGKKLEDNPKSLKSGDAAIVEMVPGKPMCVESFSQYPPLGRFAVRDMRQTVAVGVIKNVEKKSGGAGKVTKSAQKAQKAGK

SEQ ID NO: 449 - protein, 161 aa, Homo sapiens
MNLAISIALLLTVLQVSRGQKVTSLTACLVDQSLRLDCRHENTSSSPIQYEFSLTRETKKHVLFGTVGVPEHTYRSRTNFTSKYNMKVLYLSAFTSKDEGTYTCALHHSGHSPPISSQNVTVLRDKLVKCEGISLLAQNTSWLLLLLLSLSLLQATDFMSL

SEQ ID NO: 450 - protein, 368 aa, Homo sapiens
MWPLWRLVSLLALSQALPFEQRGFWDFTLDDGPFMMNDEEASGADTSGVLDPDSVTPTYSAMCPFGCHCHLRVVQCSDLGLKSVPKEISPDTTLLDLQNNDISELRKDDFKGLQHLYALVLVNNKISKIHEKAFSPLRKLQKLYISKNHLVEIPPNLPSSLVELRIHDNRIRKVPKGVFSGLRNMNCIEMGGNPLENSGFEPGAFDGLKLNYLRISEAKLTGIPKDLPETLNELHLDHNKIQAIELEDLLRYSKLYRLGLGHNQIRMIENGSLSFLPTLRELHLDNNKLARVPSGLPDLKLLQVVYLHSNNITKVGVNDFCPMGFGVKRAYYNGISLFNNPVPYWEVQPATFRCVTDRLAIQFGNYKK

SEQ ID NO: 451 - protein, 1466 aa, Homo sapiens
MMSFVQKGSWLLLALLHPTIILAQQEAVEGGCSHLGQSYADRDVWKPEPCQICVCDSGSVLCDDIICDDQELDCPNPEIPFGECCAVCPQPPTAPTRPPNGQGPQGPKGDPGPPGIPGRNGDPGIPGQPGSPGSPGPPGICESCPTGPQNYSPQYDSYDVKSGVAVGGLAGYPGPAGPPGPPGPPGTSGHPGSPGSPGYQGPPGEPGQAGPSGPPGPPGAIGPSGPAGKDGESGRPGRPGERGLPGPPGIKGPAGIPGFPGMKGHRGFDGRNGEKGETGAPGLKGENGLPGENGAPGPMGPRGAPGERGRPGLPGAAGARGNDGARGSDGQPGPPGPPGTAGFPGSPGAKGEVGPAGSPGSNGAPGQRGEPGPQGHAGAQGPPGPPGINGSPGGKGEMGPAGIPGAPGLMGARGPPGPAGANGAPGLRGGAGEPGKNGAKGEPGPRGERGEAGIPGVPGAKGEDGKDGSPGEPGANGLPGAAGERGAPGFRGPAGPNGIPGEKGPAGERGAPGPAGPRGAAGEPGRDGVPGGPGMRGMPGSPGGPGSDGKPGPPGSQGESGRPGPPGPSGPRGQPGVMGFPGPKGNDGAPGKNGERGGPGGPGPQGPPGKNGETGPQGPPGPTGPGGDKGDTGPPGPQGLQGLPGTGGPPGENGKPGEPGPKGDAGAPGAPGGKGDAGAPGERGPPGLAGAPGLRGGAGPPGPEGGKGAAGPPGPPGAAGTPGLQGMPGERGGLGSPGPKGDKGEPGGPGADGVPGKDGPRGPTGPIGPPGPAGQPGDKGEGGAPGLPGIAGPRGSPGERGETGPPGPAGFPGAPGQNGEPGGKGERGAPGEKGEGGPPGVAGPPGGSGPAGPPGPQGVKGERGSPGGPGAAGFPGARGLPGPPGSNGNPGPPGPSGSPGKDGPPGPAGNTGAPGSPGVSGPKGDAGQPGEKGSPGAQGPPGAPGPLGIAGITGARGLAGPPGMPGPRGSPGPQGVKGESGKPGANGLSGERGPPGPQGLPGLAGTAGEPGRDGNPGSDGLPGRDGSPGGKGDRGENGSPGAPGAPGHPGPPGPVGPAGKSGDRGESGPAGPAGAPGPAGSRGAPGPQGPRGDKGETGERGAAGIKGHRGFPGNPGAPGSPGPAGQQGAIGSPGPAGPRGPVGPSGPPGKDGTSGHPGPIGPPGPRGNRGERGSEGSPGHPGQPGPPGPPGAPGPCCGGVGAAAIAGIGGEKAGGFAPYYGDEPMDFKINTDEIMTSLKSVNGQIESLISPDGSRKNPARNCRDLKFCHPELKSGEYWVDPNQGCKLDAIKVFCNMETGETCISANPLNVPRKHWWTDSSAEKKHVWFGESMDGGFQFSYGNPELPEDVLDVQLAFLRLLSSRASQNITYHCKNSIAYMDQASGNVKKALKLMGSNEGEFKAEGNSKFTYTVLEDGCTKHTGEWSKTVFEYRTRKAVRLPIVDIAPYDIGGPDQEFGVDVGPVCFL

SEQ ID NO: 452 - protein, 705 aa, Homo sapiens
MWLLYLLVPALFCRAGGSIPIPQKLFGEVTSPLFPKPYPNNFETTTVITVPTGYRVKLVFQQFDLEPSEGCFYDYVKISADKKSLGRFCGQLGSPLGNPPGKKEFMSQGNKMLLTFHTDFSNEENGTIMFYKGFLAYYQAVDLDECASRSKLGEEDPQPQCQHLCHNYVGGYFCSCRPGYELQEDRHSCQAECSSELYTEASGYISSLEYPRSYPPDLRCNYSIRVERGLTLHLKFLEPFDIDDHQQVHCPYDQLQIYANGKNIGEFCGKQRPPDLDTSSNAVDLLFFTDESGDSRGWKLRYTTEIIKCPQPKTLDEFTIIQNLQPQYQFRDYFIATCKQGYQLIEGNQVLHSFTAVCQDDGTWHRAMPRCKIKDCGQPRNLPNGDFRYTTTMGVNTYKARIQYYCHEPYYKMQTRAGSRESEQGVYTCTAQGIWKNEQKGEKIPRCLPVCGKPVNPVEQRQRIIGGQKAKMGNFPWQVFTNIHGRGGGALLGDRWILTAAHTLYPKEHEAQSNASLDVFLGHTNVEELMKLGNHPIRRVSVHPDYRQDESYNFEGDIALLELENSVTLGPNLLPICLPDNDTFYDLGLMGYVSGFGVMEEKIAHDLRFVRLPVANPQACENWLRGKNRMDVFSQNMFCAGHPSLKQDACQGDSGGVFAVRDPNTDRWVATGIVSWGIGCSRGYGFYTKVLNYVDWIKKEMEEED

SEQ ID NO: 453 - protein, 211 aa, Homo sapiens
MRLFLWNAVLTLFVTSLIGALIPEPEVKIEVLQKPFICHRKTKGGDLMLVHYEGYLEKDGSLFHSTHKHNNGQPIWFTLGILEALKGWDQGLKGMCVGEKRKLIIPPALGYGKEGKGKIPPESTLIFNIDLLEIRNGPRSHESFQEMDLNDDWKLSKDEVKAYLKKEFEKHGAVVNESHHDALVEDIFDKEDEDKDGFISAREFTYKHDEL

SEQ ID NO: 454 - protein, 1220 aa, Homo sapiens
MGKKQKNKSEDSTKDDIDLDALAAEIEGAGAAKEQEPQKSKGKKKKEKKKQDFDEDDILKELEELSLEAQGIKADRETVAVKPTENNEEEFTSKDKKKKGQKGKKQSFDDNDSEELEDKDSKSKKTAKPKVEMYSGSDDDDDFNKLPKKAKGKAQKSNKKWDGSEEDEDNSKKIKERSRINSSGESGDESDEFLQSRKGQKKNQKNKPGPNIESGNEDDDASFKIKTVAQKKAEKKERERKKRDEEKAKLRKLKEKEELETGKKDQSKQKESQRKFEEETVKSKVTVDTGVIPASEEKAETPTAAEDDNEGDKKKKDKKKKKGEKEEKEKEKKKGPSKATVKAMQEALAKLKEEEERQKREEEERIKRLEELEAKRKEEERLEQEKRERKKQKEKERKERLKKEGKLLTKSQREARARAEATLKLLQAQGVEVPSKDSLPKKRPIYEDKKRKKIPQQLESKEVSESMELCAAVEVMEQGVPEKEETPPPVEPEEEEDTEDAGLDDWEAMASDEETEKVEGNTVHIEVKENPEEEEEEEEEEEEDEESEEEEEEEGESEGSEGDEEDEKVSDEKDSGKTLDKKPSKEMSSDSEYDSDDDRTKEERAYDKAKRRIEKRRLEHSKNVNTEKLRAPIICVLGHVDTGKTKILDKLRHTHVQDGEAGGITQQIWATNVPLEAINEQTKMIKNFDRENVRIPGMLIIDTPGHESFSNLRNRGSSLCDIAILVVDIMHGLEPQTIESINLLKSKKCPFIVALNKIDRLYDWKKSPDSDVAATLKKQKKNTKDEFEERAKAIIVEFAQQGLNAALFYENKDPRTFVSLVPTSAHTGDGMGSLIYLLVELTQTMLSKRLAHCEELRAQVMEVKALPGMGTTIDVILINGRLKEGDTIIVPGVEGPIVTQIRGLLLPPPMKELRVKNQYEKHKEVEAAQGVKILGKDLEKTLAGLPLLVAYKEDEIPVLKDELIHELKQTLNAIKLEEKGVYVQASTLGSLEALLEFLKTSEVPYAGINIGPVHKKDVMKASVMLEHDPQYAVILAFDVRIERDAQEMADSLGVRIFSAEIIYHLFDAFTKYRQDYKKQKQEEFKHIAVFPCKIKILPQYIFNSRDPIVMGVTVEAGQVKQGTPMCVPSKNFVDIGIVTSIEINHKQVDVAKKGQEVCVKIEPIPGESPKMFGRHFEATDILVSKISRQSIDALKDWFRDEMQKSDWQLIVELKKVFEII

SEQ ID NO: 455 - protein, 153 aa, Homo sapiens
MGKISSLPTQLFKCCFCDFLKVKMHTMSSSHLFYLALCLLTFTSSATAGPETLCGAELVDALQFVCGDRGFYFNKPTGYGSSSRRAPQTGIVDECCFRSCDLRRLEMYCAPLKPAKSARSVRAQRHTDMPKTQKEVHLKNASRGSAGNKNYRM

SEQ ID NO: 456 - protein, 201 aa, Homo sapiens
MVTLAELLVLLAALLATVSGYFVSIDAHAEECFFERVTSGTKMGLIFEVAEGGFLDIDVEITGPDNKGIYKGDRESSGKYTFAAHMDGTYKFCFSNRMSTMTPKIVMFTIDIGEAPKGQDMETEAHQNKLEEMINELAVAMTAVKHEQEYMEVRERIHRAINDNTNSRVVLWSFFEALVLVAMTLGQIYYLKRFFEVRRVV

SEQ ID NO: 457 - protein, 291 aa, Homo sapiens
MERNSSLWKNLIDEHPVCTTWKQEAEGAIYHLASILFVVGFMGGSGFFGLLYVFSLLGLGFLCSAVWAWVDVCAADIFSWNFVLFVICFMQFVHIAYQVRSITFAREFQVLYSSLFQPLGISLPVFRTIALSSEVVTLEKEHCYAMQGKTSIDKLSLLVSGRIRVTVDGEFLHYIFPLQFLDSPEWDSLRPTEEGIFQVTLTAETDCRYVSWRRKKLYLLFAQHRYISRLFSVLIGSDIADKLYALNDRVYIGKRYHYDIRLPNFYQMSTPEIRRSPLTQHFQNSRRYCDK

SEQ ID NO: 458 - protein, 303 aa, Homo sapiens
MARRGPGWRPLLLLVLLAGAAQGGLYFRRGQTCYRPLRGDGLAPLGRSTYPRPHEYLSPADLPKSWDWRNVDGVNYASITRNQHIPQYCGSCWAHASTSAMADRINIKRKGAWPSTLLSVQNVIDCGNAGSCEGGNDLSVWDYAHQHGIPDETCNNYQAKDQECDKFNQCGTCNEFKECHAIRNYTLWRVGDYGSLSGREKMMAEIYANGPISCGIMATERLANYTGGIYAEYQDTTYINHVVSVAGWGISDGTEYWIVRNSWGEPWGERGWLRIVTSTYKDGKGARYNLAIEEHCTFGDPIV

SEQ ID NO: 459 - protein, 445 aa, Homo sapiens
MREIVHIQAGQCGNQIGAKFWEVISDEHGIDPTGSYHGDSDLQLERINVYYNEAAGNKYVPRAILVDLEPGTMDSVRSGPFGQIFRPDNFVFGQSGAGNNWAKGHYTEGAELVDSVLDVVRKESESCDCLQGFQLTHSLGGGTGSGMGTLLISKIREEYPDRIMNTFSVMPSPKVSDTVVEPYNATLSVHQLVENTDETYSIDNEALYDICFRTLKLTTPTYGDLNHLVSATMSGVTTCLRFPGQLNADLRKLAVNMVPFPRLHFFMPGFAPLTSRGSQQYRALTVPELTQQMFDSKNMMAACDPRHGRYLTVAAIFRGRMSMKEVDEQMLNVQNKNSSYFVEWIPNNVKTAVCDIPPRGLKMSATFIGNSTAIQELFKRISEQFTAMFRRKAFLHWYTGEGMDEMEFTEAESNMNDLVSEYQQYQDATADEQGEFEEEEGEDEA

SEQ ID NO: 460 - protein, 2541 aa, Homo sapiens
MVALSLKISIGNVVKTMQFEPSTMVYDACRIIRERIPEAPAGPPSDFGLFLSDDDPKKGIWLEAGKALDYYMLRNGDTMEYRKKQRPLKIRMLDGTVKTIMVDDSKTVTDMLMTICARIGITNHDEYSLVRELMEEKKEEITGTLRKDKTLLRDEKKMEKLKQKLHTDDELNWLDHGRTLREQGVEEHETLLLRRKFFYSDQNVDSRDPVQLNLLYVQARDDILNGSHPVSFDKACEFAGFQCQIQFGPHNEQKHKAGFLDLKDFLPKEYVKQKGERKIFQAHKNCGQMSEIEAKVRYVKLARSLKTYGVSFFLVKEKMKGKNKLVPRLLGITKECVMRVDEKTKEVIQEWNLTNIKRWAASPKSFTLDFGDYQDGYYSVQTTEGEQIAQLIAGYIDIILKKKKSKDHFGLEGDEESTMLEDSVSPKKSTVLQQQYNRVGKVEHGSVALPAIMRSGASGPENFQVGSMPPAQQQITSGQMHRGHMPPLTSAQQALTGTINSSMQAVQAAQATLDDFDTLPPLGQDAASKAWRKNKMDESKHEIHSQVDAITAGTASVVNLTAGDPAETDYTAVGCAVTTISSNLTEMSRGVKLLAALLEDEGGSGRPLLQAAKGLAGAVSELLRSAQPASAEPRQNLLQAAGNVGQASGELLQQIGESDTDPHFQDALMQLAKAVASAAAALVLKAKSVAQRTEDSGLQTQVIAAATQCALSTSQLVACTKVVAPTISSPVCQEQLVEAGRLVAKAVEGCVSASQAATEDGQLLRGVGAAATAVTQALNELLQHVKAHATGAGPAGRYDQATDTILTVTENIFSSMGDAGEMVGQARILAQATSDLVNAIKADAEGESDLENSRKLLSAAKILADATAKMVEAAKGAAAHPDSEEQQQRLREAAEGLRMATNAAAQNAIKKKLVQRLEHAAKQAAASATQTIAAAQHAASTPKASAGPQPLLVQSCKAVAEQIPLLVQGVRGSQAQPDSPSAQLALIAASQSFLQPGGKMVAAAKASVPTIQDQASAMQLSQCAKNLGTALAELRTAAQKAQEACGPLEMDSALSVVQNLEKDLQEVKAAARDGKLKPLPGETMEKCTQDLGNSTKAVSSAIAQLLGEVAQGNENYAGIAARDVAGGLRSLAQAARGVAALTSDPAVQAIVLDTASDVLDKASSLIEEAKKAAGHPGDPESQQRLAQVAKAVTQALNRCVSCLPGQRDVDNALRAVGDASKRLLSDSLPPSTGTFQEAQSRLNEAAAGLNQAATELVQASRGTPQDLARASGRFGQDFSTFLEAGVEMAGQAPSQEDRAQVVSNLKGISMSSSKLLLAAKALSTDPAAPNLKSQLAAAARAVTDSINQLITMCTQQAPGQKECDNALRELETVRELLENPVQPINDMSYFGCLDSVMENSKVLGEAMTGISQNAKNGNLPEFGDAISTASKALCGFTEAAAQAAYLVGVSDPNSQAGQQGLVEPTQFARANQAIQMACQSLGEPGCTQAQVLSAATIVAKHTSALCNSCRLASARTTNPTAKRQFVQSAKEVANSTANLVKTIKALDGAFTEENRAQCRAATAPLLEAVDNLSAFASNPEFSSIPAQISPEGRAAMEPIVISAKTMLESAGGLIQTARALAVNPRDPPSWSVLAGHSRTVSDSIKKLITSMRDKAPGQLECETAIAALNSCLRDLDQASLAAVSQQLAPREGISQEALHTQMLTAVQEISHLIEPLANAARAEASQLGHKVSQMAQYFEPLTLAAVGAASKTLSHPQQMALLDQTKTLAESALQLLYTAKEAGGNPKQAAHTQEALEEAVQMMTEAVEDLTTTLNEAASAAGVVGGMVDSITQAINQLDEGPMGEPEGSFVDYQTTMVRTAKAIAVTVQEMVTKSNTSPEELGPLANQLTSDYGRLASEAKPAAVAAENEEIGSHIKHRVQELGHGCAALVTKAGALQCSPSDAYTKKELIECARRVSEKVSHVLAALQAGNRGTQACITAASAVSGIIADLDTTIMFATAGTLNREGTETFADHREGILKTAKVLVEDTKVLVQNAAGSQEKLAQAAQSSVATITRLADVVKLGAASLGAEDPETQVVLINAVKDVAKALGDLISATKAAAGKVGDDPAVWQLKNSAKVMVTNVTSLLKTVKAVEDEATKGTRALEATTEHIRQELAVFCSPEPPAKTSTPEDFIRMTKGITMATAKAVAAGNSCRQEDVIATANLSRRAIADMLRACKEAAYHPEVAPDVRLRALHYGRECANGYLELLDHVLLTLQKPSPELKQQLTGHSKRVAGSVTELIQAAEAMKGTEWVDPEDPTVIAENELLGAAAAIEAAAKKLEQLKPRAKPKEADESLNFEEQILEAAKSIAAATSALVKAASAAQRELVAQGKVGAIPANALDDGQWSQGLISAARMVAAATNNLCEAANAAVQGHASQEKLISSAKQVAASTAQLLVACKVKADQDSEAMKRLQAAGNAVKRASDNLVKAAQKAAAFEEQENETVVVKEKMVGGIAQIIAAQEEMLRKERELEEARKKLAQIRQQQYKFLPSELRDEH

SEQ ID NO: 461 - protein, 730 aa, Homo sapiens
MPGVARLPLLLGLLLLPRPGRPLDLADYTYDLAEEDDSEPLNYKDPCKAAAFLGDIALDEEDLRAFQVQQAVDLRRHTARKSSIKAAVPGNTSTPSCQSTNGQPQRGACGRWRGRSRSRRAATSRPERVWPDGVIPFVIGGNFTGSQRAVFRQAMRHWEKHTCVTFLERTDEDSYIVFTYRPCGCCSYVGRRGGGPQAISIGKNCDKFGIVVHELGHVVGFWHEHTRPDRDRHVSIVRENIQPGQEYNFLKMEPQEVESLGETYDFDSIMHYARNTFSRGIFLDTIVPKYEVNGVKPPIGQRTRLSKGDIAQARKLYKCPACGETLQDSTGNFSSPEYPNGYSAHMHCVWRISVTPGEKIILNFTSLDLYRSRLCWYDYVEVRDGFWRKAPLRGRFCGSKLPEPIVSTDSRLWVEFRSSSNWVGKGFFAVYEAICGGDVKKDYGHIQSPNYPDDYRPSKVCIWRIQVSEGFHVGLTFQSFEIERHDSCAYDYLEVRDGHSESSTLIGRYCGYEKPDDIKSTSSRLWLKFVSDGSINKAGFAVNFFKEVDECSRPNRGGCEQRCLNTLGSYKCSCDPGYELAPDKRRCEAACGGFLTKLNGSITSPGWPKEYPPNKNCIWQLVAPTQYRISLQFDFFETEGNDVCKYDFVEVRSGLTADSKLHGKFCGSEKPEVITSQYNNMRVEFKSDNTVSKKGFKAHFFSEKRPALQPPRGRPHQLKFRVQKRNRTPQ

SEQ ID NO: 462 - protein, 212 aa, Homo sapiens
MGPGPRLLLPLVLCVGLGALVFSSGAEGFRKRGPSVTAKVFFDVRIGDKDVGRIVIGLFGKVVPKTVENFVALATGEKGYGYKGSKFHRVIKDFMIQGGDITTGDGTGGVSIYGETFPDENFKLKHYGIGWVSMANAGPDTNGSQFFITLTKPTWLDGKHVVFGKVIDGMTVVHSIELQATDGHDRPLTNCSIINSGKIDVKTPFVVEIADW

SEQ ID NO: 463 - protein, 738 aa, Homo sapiens
MTSSGPGPRFLLLLPLLLPPAASASDRPRGRDPVNPEKLLVITVATAETEGYLRFLRSAEFFNYTVRTLGLGEEWRGGDVARTVGGGQKVRWLKKEMEKYADREDMIIMFVDSYDVILAGSPTELLKKFVQSGSRLLFSAESFCWPEWGLAEQYPEVGTGKRFLNSGGFIGFATTIHQIVRQWKYKDDDDDQLFYTRLYLDPGLREKLSLNLDHKSRIFQNLNGALDEVVLKFDRNRVRIRNVAYDTLPIVVHGNGPTKLQLNYLGNYVPNGWTPEGGCGFCNQDRRTLPGGQPPPRVFLAVFVEQPTPFLPRFLQRLLLLDYPPDRVTLFLHNNEVFHEPHIADSWPQLQDHFSAVKLVGPEEALSPGEARDMAMDLCRQDPECEFYFSLDADAVLTNLQTLRILIEENRKVIAPMLSRHGKLWSNFWGALSPDEYYARSEDYVELVQRKRVGVWNVPYISQAYVIRGDTLRMELPQRDVFSGSDTDPDMAFCKSFRDKGIFLHLSNQHEFGRLLATSRYDTEHLHPDLWQIFDNPVDWKEQYIHENYSRALEGEGIVEQPCPDVYWFPLLSEQMCDELVAEMEHYGQWSGGRHEDSRLAGGYENVPTVDIHMKQVGYEDQWLQLLRTYVGPMTESLFPGYHTKARAVMNFVVRYRPDEQPSLRPHHDSSTFTLNVALNHKGLDYEGGGCRFLRYDCVISSPRKGWALLHPGRLTHYHEGLPTTWGTRYIMVSFVDP

SEQ ID NO: 464 - protein, 1838 aa, Homo sapiens
MDVHTRWKARSALRPGAPLLPPLLLLLLWAPPPSRAAQPADLLKVLDFHNLPDGITKTTGFCATRRSSKGPDVAYRVTKDAQLSAPTKQLYPASAFPEDFSILTTVKAKKGSQAFLVSIYNEQGIQQIGLELGRSPVFLYEDHTGKPGPEDYPLFRGINLSDGKWHRIALSVHKKNVTLILDCKKKTTKFLDRSDHPMIDINGIIVFGTRILDEEVFEGDIQQLLFVSDHRAAYDYCEHYSPDCDTAVPDTPQSQDPNPDEYYTEGDGEGETYYYEYPYYEDPEDLGKEPTPSKKPVEAAKETTEVPEELTPTPTEAAPMPETSEGAGKEEDVGIGDYDYVPSEDYYTPSPYDDLTYGEGEENPDQPTDPGAGAEIPTSTADTSNSSNPAPPPGEGADDLEGEFTEETIRNLDENYYDPYYDPTSSPSEIGPGMPANQDTIYEGIGGPRGEKGQKGEPAIIEPGMLIEGPPGPEGPAGLPGPPGTMGPTGQVGDPGERGPPGRPGLPGADGLPGPPGTMLMLPFRFGGGGDAGSKGPMVSAQESQAQAILQQARLALRGPAGPMGLTGRPGPVGPPGSGGLKGEPGDVGPQGPRGVQGPPGPAGKPGRRGRAGSDGARGMPGQTGPKGDRGFDGLAGLPGEKGHRGDPGPSGPPGPPGDDGERGDDGEVGPRGLPGEPGPRGLLGPKGPPGPPGPPGVTGMDGQPGPKGNVGPQGEPGPPGQQGNPGAQGLPGPQGAIGPPGEKGPLGKPGLPGMPGADGPPGHPGKEGPPGEKGGQGPPGPQGPIGYPGPRGVKGADGIRGLKGTKGEKGEDGFPGFKGDMGIKGDRGEIGPPGPRGEDGPEGPKGRGGPNGDPGPLGPPGEKGKLGVPGLPGYPGRQGPKGSIGFPGFPGANGEKGGRGTPGKPGPRGQRGPTGPRGERGPRGITGKPGPKGNSGGDGPAGPPGERGPNGPQGPTGFPGPKGPPGPPGKDGLPGHPGQRGETGFQGKTGPPGPPGVVGPQGPTGETGPMGERGHPGPPGPPGEQGLPGLAGKEGTKGDPGPAGLPGKDGPPGLRGFPGDRGLPGPVGALGLKGNEGPPGPPGPAGSPGERGPAGAAGPIGIPGRPGPQGPPGPAGEKGAPGEKGPQGPAGRDGLQGPVGLPGPAGPVGPPGEDGDKGEIGEPGQKGSKGDKGEQGPPGPTGPQGPIGQPGPSGADGEPGPRGQQGLFGQKGDEGPRGFPGPPGPVGLQGLPGPPGEKGETGDVGQMGPPGPPGPRGPSGAPGADGPQGPPGGIGNPGAVGEKGEPGEAGEPGPSGRSGPPGPKGERGEKGESGPSGAAGPPGPKGPPGDDGPKGSPGPVGFPGDPGPPGEPGPAGQDGPPGDKGDDGEPGQTGSPGPTGEPGPSGPPGKRGPPGPAGPEGRQGEKGAKGEAGLEGPPGKTGPIGPQGAPGKPGPDGLRGIPGPVGEQGLPGSPGPDGPPGPMGPPGLPGLKGDSGPKGEKGHPGLIGLIGPPGEQGEKGDRGLPGPQGSSGPKGEQGITGPSGPIGPPGPPGLPGPPGPKGAKGSSGPTGPKGEAGHPGPPGPPGPPGEVIQPLPIQASRTRRNIDASQLLDDGNGENYVDYADGMEEIFGSLNSLKLEIEQMKRPLGTQQNPARTCKDLQLCHPDFPDGEYWVDPNQGCSRDSFKVYCNFTAGGSTCVFPDKKSEGARITSWPKENPGSWFSEFKRGKLLSYVDAEGNPVGVVQMTFLRLLSASAHQNVTYHCYQSVAWQDAATGSYDKALRFLGSNDEEMSYDNNPYIRALVDGCATKKGYQKTVLEIDTPKVEQVPIVDIMFNDFGEASQKFGFEVGPACFMG

SEQ ID NO: 465 - protein, 320 aa, Homo sapiens
MAQVLRGTVTDFPGFDERADAETLRKAMKGLGTDEESILTLLTSRSNAQRQEISAAFKTLFGRDLLDDLKSELTGKFEKLIVALMKPSRLYDAYELKHALKGAGTNEKVLTEIIASRTPEELRAIKQVYEEEYGSSLEDDVVGDTSGYYQRMLVVLLQANRDPDAGIDEAQVEQDAQALFQAGELKWGTDEEKFITIFGTRSVSHLRKVFDKYMTISGFQIEETIDRETSGNLEQLLLAVVKSIRSIPAYLAETLYYAMKGAGTDDHTLIRVMVSRSEIDLFNIRKEFRKNFATSLYSMIKGDTSGDYKKALLLLCGEDD

SEQ ID NO: 466 - protein, 647 aa, Homo sapiens
MAEEEAPKKSRAAGGGASWELCAGALSARLAEEGSGDAGGRRRPPVDPRRLARQLLLLLWLLEAPLLLGVRAQAAGQGPGQGPGPGQQPPPPPQQQQSGQQYNGERGISVPDHGYCQPISIPLCTDIAYNQTIMPNLLGHTNQEDAGLEVHQFYPLVKVQCSAELKFFLCSMYAPVCTVLEQALPPCRSLCERARQGCEALMNKFGFQWPDTLKCEKFPVHGAGELCVGQNTSDKGTPTPSLLPEFWTSNPQHGGGGHRGGFPGGAGASERGKFSCPRALKVPSYLNYHFLGEKDCGAPCEPTKVYGLMYFGPEELRFSRTWIGIWSVLCCASTLFTVLTYLVDMRRFSYPERPIIFLSGCYTAVAVAYIAGFLLEDRVVCNDKFAEDGARTVAQGTKKEGCTILFMMLYFFSMASSIWWVILSLTWFLAAGMKWGHEAIEANSQYFHLAAWAVPAIKTITILALGQVDGDVLSGVCFVGLNNVDALRGFVLAPLFVYLFIGTSFLLAGFVSLFRIRTIMKHDGTKTEKLEKLMVRIGVFSVLYTVPATIVIACYFYEQAFRDQWERSWVAQSCKSYAIPCPHLQAGGGAPPHPPMSPDFTVFMIKYLMTLIVGITSGFWIWSGKTLNSWRKFYTRLTNSKQGETTV

SEQ ID NO: 467 - protein, 359 aa, Homo sapiens
MRASQKDFENSMNQVKLLKKDPGNEVKLKLYALYKQATEGPCNMPKPGVFDLINKAKWDAWNALGSLPKEAARQNYVDLVSSLSPSLESSSQVEPGTDRKSTGFETLVVTSEDGITKIMFNRPKKKNAINTEMYHEIMRALKAASKDDSIITVLTGNGDYYSSGNDLTNFTDIPPGGVEEKAKNNAVLLREFVGCFIDFPKPLIAVVNGPAVGISVTLLGLFDAVYASDRATFHTPFSHLGQSPEGCSSYTFPKIMSPAKATEMLIFGKKLTAGEACAQGLVTEVFPDSTFQKEVWTRLKAFAKLPPNALRISKEVIRKREREKLHAVNAEECNVLQGRWLSDECTNAVVNFLSRKSKL

SEQ ID NO: 468 - protein, 277 aa, Homo sapiens
MSKSLKKLVEESREKNQPEVDMSDRGISNMLDVNGLFTLSHITQLVLSHNKLTMVPPNIAELKNLEVLNFFNNQIEELPTQISSLQKLKHLNLGMNRLNTLPRGFGSLPALEVLDLTYNNLSENSLPGNFFYLTTLRALYLSDNDFEILPPDIGKLTKLQILSLRDNDLISLPKEIGELTQLKELHIQGNRLTVLPPELGNLDLTGQKQVFKAENNPWVTPIADQFQLGVSHVFEYIRSETYKYLYGRHMQANPEPPKKNNDKSKKISRKPLAAKNR

SEQ ID NO: 469 - protein, 437 aa, Homo sapiens
MTQLFLWEYGDLHLFGPNQRPAPCYDPCEAVLVESIPEGLDFPNASTGNPSTSQAWLGLLAGAHSSLDIASFYWTLTNNDTHTQEPSAQQGEEVLRQLQTLAPKGVNVRIAVSKPSGPQPQADLQALLQSGAQVRMVDMQKLTHGVLHTKFWVVDQTHFYLGSANMDWRSLTQVKELGVVMYNCSCLARDLTKIFEAYWFLGQAGSSIPSTWPRFYDTRYNQETPMEICLNGTPALAYLASAPPPLCPSGRTPDLKALLNVVDNARSFIYVAVMNYLPTLEFSHPHRFWPAIDDGLRRATYERGVKVRLLISCWGHSEPSMRAFLLSLAALRDNHTHSDIQVKLFVVPADEAQARIPYARVNHNKYMVTERATYIGTSNWSGNYFTETAGTSLLVTQNGRGGLRSQLEAIFLRDWDSPYIHDLDTSADSVGNACRLL

SEQ ID NO: 470 - protein, 315 aa, Homo sapiens
MDLRQFLMCLSLCTAFALSKPTEKKDRVHHEPQLSDKVHNDAQSFDYDHDAFLGAEEAKTFDQLTPEESKERLGKIVSKIDGDKDGFVTVDELKDWIKFAQKRWIYEDVERQWKGHDLNEDGLVSWEEYKNATYGYVLDDPDPDDGFNYKQMMVRDERRFKMADKDGDLIATKEEFTAFLHPEEYDYMKDIVVQETMEDIDKNADGFIDLEEYIGDMYSHDGNTDEPEWVKTEREQFVEFRDKNRDGKMDKEETKDWILPSDYDHAEAEARHLVYESDQNKDGKLTKEEIVDKYDLFVGSQATDFGEALVRHDEF

SEQ ID NO: 471 - protein, 770 aa, Homo sapiens
MLPGLALLLLAAWTARALEVPTDGNAGLLAEPQIAMFCGRLNMHMNVQNGKWDSDPSGTKTCIDTKEGILQYCQEVYPELQITNVVEANQPVTIQNWCKRGRKQCKTHPHFVIPYRCLVGEFVSDALLVPDKCKFLHQERMDVCETHLHWHTVAKETCSEKSTNLHDYGMLLPCGIDKFRGVEFVCCPLAEESDNVDSADAEEDDSDVWWGGADTDYADGSEDKVVEVAEEEEVAEVEEEEADDDEDDEDGDEVEEEAEEPYEEATERTTSIATTTTTTTESVEEVVREVCSEQAETGPCRAMISRWYFDVTEGKCAPFFYGGCGGNRNNFDTEEYCMAVCGSAMSQSLLKTTQEPLARDPVKLPTTAASTPDAVDKYLETPGDENEHAHFQKAKERLEAKHRERMSQVMREWEEAERQAKNLPKADKKAVIQHFQEKVESLEQEAANERQQLVETHMARVEAMLNDRRRLALENYITALQAVPPRPRHVFNMLKKYVRAEQKDRQHTLKHFEHVRMVDPKKAAQIRSQVMTHLRVIYERMNQSLSLLYNVPAVAEEIQDEVDELLQKEQNYSDDVLANMISEPRISYGNDALMPSLTETKTTVELLPVNGEFSLDDLQPWHSFGADSVPANTENEVEPVDARPAADRGLTTRPGSGLTNIKTEEISEVKMDAEFRHDSGYEVHHQKLVFFAEDVGSNKGAIIGLMVGGVVIATVIVITLVMLKKKQYTSIHHGVVEVDAAVTPEERHLSKMQQNGYENPTYKFFEQMQN

SEQ ID NO: 472 - protein, 742 aa, Homo sapiens
MGGRVFLAFCVWLTLPGAETQDSRGCARWCPQNSSCVNATACRCNPGFSSFSEIITTPTETCDDINECATPSKVSCGKFSDCWNTEGSYDCVCSPGYEPVSGAKTFKNESENTCQDVDECSSGQHQCDSSTVCFNTVGSYSCRCRPGWKPRHGIPNNQKDTVCEDMTFSTWTPPPGVHSQTLSRFFDKVQDLGRDSKTSSAEVTIQNVIKLVDELMEAPGDVEALAPPVRHLIATQLLSNLEDIMRILAKSLPKGPFTYISPSNTELTLMIQERGDKNVTMGQSSARMKLNWAVAAGAEDPGPAVAGILSIQNMTTLLANASLNLHSKKQAELEEIYESSIRGVQLRRLSAVNSIFLSHNNTKELNSPILFAFSHLESSDGEAGRDPPAKDVMPGPRQELLCAFWKSDSDRGGHWATEGCQVLGSKNGSTTCQCSHLSSFAILMAHYDVEDWKLTLITRVGLALSLFCLLLCILTFLLVRPIQGSRTTIHLHLCICLFVGSTIFLAGIENEGGQVGLRCRLVAGLLHYCFLAAFCWMSLEGLELYFLVVRVFQGQGLSTRWLCLIGYGVPLLIVGVSAAIYSKGYGRPRYCWLDFEQGFLWSFLGPVTFIILCNAVIFVTTVWKLTQKFSEINPDMKKLKKARALTITAIAQLFLLGCTWVFGLFIFDDRSLVLTYVFTILNCLQGAFLYLLHCLLNKKVREEYRKWACLVAGGSKYSEFTSTTSGTGHNQTRALRASESGI

SEQ ID NO: 473 - protein, 491 aa, Homo sapiens
MKRMVSWSFHKLKTMKHLLLLLLCVFLVKSQGVNDNEEGFFSARGHRPLDKKREEAPSLRPAPPPISGGGYRARPAKAAATQKKVERKAPDAGGCLHADPDLGVLCPTGCQLQEALLQQERPIRNSVDELNNNVEAVSQTSSSSFQYMYLLKDLWQKRQKQVKDNENVVNEYSSELEKHQLYIDETVNSNIATNLRVLRSILENLRSKIQKLESDVSAQMEYCRTPCTVSCNIPVVSGKECEEIIRKGGETSEMYLIQPDSSVKPYRVYCDMNTENGGWTVIQNRQDGSVDFGRKWDPYKQGFGNVATNTDGKNYCGLPGEYWLGNDKISQLTRMGPTELLIEMEDWKGDKVKAHYGGFTVQNEANKYQISVNKYRGTAGNALMDGASQLMGENRTMTIHNGMFFSTYDRDNDGWLTSDPRKQCSKEDGGGWWYNRCHAANPNGRYYWGGQYTWDMAKHGTDDGVVWMNWKGSWYSMRKMSMKIRPFFPQQ

SEQ ID NO: 474 - protein, 308 aa, Homo sapiens
MWKRWLALALALVAVAWVRAEEELRSKSKICANVFCGAGRECAVTEKGEPTCLCIEQCKPHKRPVCGSNGKTYLNHCELHRDACLTGSKIQVDYDGHCKEKKSVSPSASPVVCYQSNRDELRRRIIQWLEAEIIPDGWFSKGSNYSEILDKYFKNFDNGDSRLDSSEFLKFVEQNETAINITTYPDQENNKLLRGLCVDALIELSDENADWKLSFQEFLKCLNPSFNPPEKKCALEDETYADGAETEVDCNRCVCACGNWVCTAMTCDGKNQKGAQTQTEEEMTRYVQELQKHQETAEKTKRVSTKEI

SEQ ID NO: 475 - protein, 321 aa, Homo sapiens
MAMATKGGTVKAASGFNAMEDAQTLRKAMKGLGTDEDAIISVLAYRNTAQRQEIRTAYKSTIGRDLIDDLKSELSGNFEQVIVGMMTPTVLYDVQELRRAMKGAGTDEGCLIEILASRTPEEIRRISQTYQQQYGRSLEDDIRSDTSFMFQRVLVSLSAGGRDEGNYLDDALVRQDAQDLYEAGEKKWGTDEVKFLTVLCSRNRNHLLHVFDEYKRISQKDIEQSIKSETSGSFEDALLAIVKCMRNKSAYFAEKLYKSMKGLGTDDNTLIRVMVSRAEIDMLDIRAHFKRLYGKSLYSFIKGDTSGDYRKVLLVLCGGDD

SEQ ID NO: 476 - protein, 797 aa, Homo sapiens
MAAAPVAAGSGAGRGRRSAATVAAWGGWGGRPRPGNILLQLRQGQLTGRGLVRAVQFTETFLTERDKQSKWSGIPQLLLKLHTTSHLHSDFVECQNILKEISPLLSMEAMAFVTEERKLTQETTYPNTYIFDLFGGVDLLVEILMRPTISIRGQKLKISDEMSKDCLSILYNTCVCTEGVTKRLAEKNDFVIFLFTLMTSKKTFLQTATLIEDILGVKKEMIRLDEVPNLSSLVSNFDQQQLANFCRILAVTISEMDTGNDDKHTLLAKNAQQKKSLSLGPSAAEINQAALLSIPGFVERLCKLATRKVSESTGTASFLQELEEWYTWLDNALVLDALMRVANEESEHNQASIVFPPPGASEENGLPHTSARTQLPQSMKIMHEIMYKLEVLYVLCVLLMGRQRNQVHRMIAEFKLIPGLNNLFDKLIWRKHSASALVLHGHNQNCDCSPDITLKIQFLRLLQSFSDHHENKYLLLNNQELNELSAISLKANIPEVEAVLNTDRSLVCDGKRGLLTRLLQVMKKEPAESSFRFWQARAVESFLRGTTSYADQMFLLKRGLLEHILYCIVDSECKSRDVLQSYFDLLGELMKFNVDAFKRFNKYINTDAKFQVFLKQINSSLVDSNMLVRCVTLSLDRFENQVDMKVAEVLSECRLLAYISQVPTQMSFLFRLINIIHVQTLTQENVSCLNTSLVILMLARRKERLPLYLRLLQRMEHSKKYPGFLLNNFHNLLRFWQQHYLHKDKDSTCLENSSCISFSYWKETVSILLNPDRQSPSALVSYIEEPYMDIDRDFTEE

SEQ ID NO: 477 - protein, 425 aa, Homo sapiens
MATAEVLNIGKKLYEGKTKEVYELLDSPGKVLLQSKDQITAGNAARKNHLEGKAAISNKITSCIFQLLQEAGIKTAFTRKCGETAFIAPQCEMIPIEWVCRRIATGSFLKRNPGVKEGYKFYPPKVELFFKDDANNDPQWSEEQLIAAKFCFAGLLIGQTEVDIMSHATQAIFEILEKSWLPQNCTLVDMKIEFGVDVTTKEIVLADVIDNDSWRLWPSGDRSQQKDKQSYRDLKEVTPEGLQMVKKNFEWVAERVELLLKSESQCRVVVLMGSTSDLGHCEKIKKACGNFGIPCELRVTSAHKGPDETLRIKAEYEGDGIPTVFVAVAGRSNGLGPVMSGNTAYPVISCPPLTPDWGVQDVWSSLRLPSGLGCSTVLSPEGSAQFAAQIFGLSNHLVWSKLRASILNTWISLKQADKKIRECNL

SEQ ID NO: 478 - protein, 734 aa, Homo sapiens
MWGLLLALAAFAPAVGPALGAPRNSVLGLAQPGTTKVPGSTPALHSSPAQPPAETANGTSEQHVRIRVIKKKKVIMKKRKKLTLTRPTPLVTAGPLVTPTPAGTLDPAEKQETGCPPLGLESLRVSDSRLEASSSQSFGLGPHRGRLNIQSGLEDGDLYDGAWCAEEQDADPWFQVDAGHPTRFSGVITQGRNSVWRYDWVTSYKVQFSNDSRTWWGSRNHSSGMDAVFPANSDPETPVLNLLPEPQVARFIRLLPQTWLQGGAPCLRAEILACPVSDPNDLFLEAPASGSSDPLDFQHHNYKAMRKLMKQVQEQCPNITRIYSIGKSYQGLKLYVMEMSDKPGEHELGEPEVRYVAGMHGNEALGRELLLLLMQFLCHEFLRGNPRVTRLLSEMRIHLLPSMNPDGYEIAYHRGSELVGWAEGRWNNQSIDLNHNFADLNTPLWEAQDDGKVPHIVPNHHLPLPTYYTLPNATVAPETRAVIKWMKRIPFVLSANLHGGELVVSYPFDMTRTPWAARELTPTPDDAVFRWLSTVYAGSNLAMQDTSRRPCHSQDFSVHGNIINGADWHTVPGSMNDFSYLHTNCFEVTVELSCDKFPHENELPQEWENNKDALLTYLEQVRMGIAGVVRDKDTELGIADAVIAVDGINHDVTTAWGGDYWRLLTPGDYMVTASAEGYHSVTRNCRVTFEEGPFPCNFVLTKTPKQRLRELLAAGAKVPPDLRRRLERLRGQKD

SEQ ID NO: 479 - protein, 588 aa, Homo sapiens
MQAAGPLFRSKDKVEQTPRSQQDPAGPGLPAQSDRLANHQEDDVDLEALVNDMNASLESLYSACSMQSDTVPLLQNGQHARSQPRASGPPRSIQPQVSPRQRVQRSQPVHILAVRRLQEEDQQFRTSSLPAIPNPFPELCGPGSPAVLTPGSLPPSQAAAKQDVKVFSEDGTSKVVEILADMTARDLCQLLVYKSHCVDDNSWTLVEHHPHLGLERCLEDHELVVQVESTMASESKFLFRKNYAKYEFFKNPMNFFPEQMVTWCQQSNGSQTQLLQNFLNSSSCPEIQGFLHVKELGKKSWKKLYVCLRRSGLYCSTKGTSKEPRHLQLLADLEDSNIFSLIAGRKQYNAPTDHGLCIKPNKVRNETKELRLLCAEDEQTRTCWMTAFRLLKYGMLLYQNYRIPQQRKALLSPFSTPVRSVSENSLVAMDFSGQTGRVIENPAEAQSAALEEGHAWRKRSTRMNILGSQSPLHPSTLSTVIHRTQHWFHGRISREESHRIIKQQGLVDGLFLLRDSQSNPKAFVLTLCHHQKIKNFQILPCEDDGQTFFSLDDGNTKFSDLIQLVDFYQLNKGVLPCKLKHHCIRVAL

SEQ ID NO: 480 - protein, 192 aa, Homo sapiens [sequence omitted]

SEQ ID NO: 481 - protein, 147 aa, Homo sapiens
MALQRTHSLLLLLLLTLLGLGLVQPSYGQDGMYQRFLRQHVHPEETGGSDRYCNLMMQRRKMTLYHCKRFNTFIHEDIWNIRSICSTTNIQCKNGKMNCHEGVVKVTDCRDTGSSRAPNCRYRAIASTRRVVIACEGNPQVPVHFDG

SEQ ID NO: 482 - protein, 711 aa, Homo sapiens
MKLVFLVLLFLGALGLCLAGRRRRSVQWCAVSQPEATKCFQWQRNMRKVRGPPVSCIKRDSPIQCIQAIAENRADAVTLDGGFIYEAGLAPYKLRPVAAEVYGTERQPRTHYYAVAVVKKGGSFQLNELQGLKSCHTGLRRTAGWNVPTGTLRPFLNWTGPPEPIEAAVARFFSASCVPGADKGQFPNLCRLCAGTGENKCAFSSQEPYFSYSGAFKCLRDGAGDVAFIRESTVFEDLSDEAERDEYELLCPDNTRKPVDKFKDCHLARVPSHAVVARSVNGKEDAIWNLLRQAQEKFGKDKSPKFQLFGSPSGQKDLLFKDSAIGFSRVPPRIDSGLYLGSGYFTAIQNLRKSEEEVAARRARVVWCAVGEQELRKCNQWSGLSEGSVTCSSASTTEDCIALVLKGEADAMSLDGGYVYTACKCGLVPVLAENYKSQQSSDPDPNCVDRPVEGYLAVAVVRRSDTSLTWNSVKGKKSCHTAVDRTAGWNIPMGLLFNQTGSCKFDEYFSQSCAPGSDPRSNLCALCIGDEQGENKCVPNSNERYYGYTGAFRCLAENAGDVAFVKDVTVLQNTDGNNNEAWAKDLKLADFALLCLDGKRKPVTEARSCHLAMAPNHAVVSRMDKVERLKQVLLHQQAKFGRNGSDCPDKFCLFQSETKNLLFNDNTECLARLHGKTTYEKYLGPQYVAGITNLKKCSTSPLLEACEFLRK

SEQ ID NO: 483 - protein, 673 aa, Homo sapiens
MAKPAQGAKYRGSIHDFPGFDPNQDAEALYTAMKGFGSDKEAILDIITSRSNRQRQEVCQSYKSLYGKDLIADLKYELTGKFERLIVGLMRPPAYCDAKEIKDAISGIGTDEKCLIEILASRTNEQMHQLVAAYKDAYERDLEADIIGDTSGHFQKMLVVLLQGTREEDDVVSEDLVQQDVQDLYEAGELKWGTDEAQFIYILGNRSKQHLRLVFDEYLKTTGKPMKASIRGELSGDFEKLMLAVVKCIRSTPEYFAERLFKAMKGLGTRDNTLIRIMVSRSELDMLDIREIFRTKYEKSLYSMIKNDTSGEYKKTLLKLSGGDDDAAGQFFPEAAQVAYQMWELSAVARVELKGTVRPANDFNPDADAKALRKAMKGLGTDEDTIIDIITHRSNVQRQQIRQTFKSHFGRDLMTDLKSEISGDLARLILGLMMPPAHYDAKQLKKAMEGAGTDEKALIEILATRTNAEIRAINEAYKEDYHKSLEDALSSDTSGHFRRILISLATGHREEGGENLDQAREDAQVAAEILEIADTPSGDKTSLETRFMTILCTRTYPHLRRVFQEFIKMTNYDVEHTIKKEMSGDVRDAFVAIVQSVKNKPLFFADKLYKSMKGAGTDEKTLTRIMVSRSEIDLLNIRREFIEKYDKSLHQAIEGDTSGDFLKALLALCGGED

SEQ ID NO: 484 - protein, 351 aa, Homo sapiens
MGNAATAKKGSEVESVKEFLAKAKEDFLKKWENPTQNNAGLEDFERKKTLGTGSFGRVMLVKHKATEQYYAMKILDKQKVVKLKQIEHTLNEKRILQAVNFPFLVRLEYAFKDNSNLYMVMEYVPGGEMFSHLRRIGRFSEPHARFYAAQIVLTFEYLHSLDLIYRDLKPENLLIDHQGYIQVTDFGFAKRVKGRTWTLCGTPEYLAPEIILSKGYNKAVDWWALGVLIYEMAAGYPPFFADQPIQIYEKIVSGKVRFPSHFSSDLKDLLRNLLQVDLTKRFGNLKNGVSDIKTHKWFATTDWIAIYQRKVEAPFIPKFRGSGDTSNFDDYEEEDIRVSITEKCAKEFGEF

SEQ ID NO: 485 - protein, 570 aa, Homo sapiens
MSYQGKKNIPRITSDRLLIKGGRIVNDDQSFYADIYMEDGLIKQIGDNLIVPGGVKTIEANGKMVIPGGIDVHTHFQMPYKGMTTVDDFFQGTKAALAGGTTMIIDHVVPEPESSLTEAYEKWREWADGKSCCDYALHVDITHWNDSVKQEVQNLIKDKGVNSFMVYMAYKDLYQVSNTELYEIFTCLGELGAIAQVHAENGDIIAQEQTRMLEMGITGPEGHVLSRPEELEAEAVFRAITIASQTNCPLYVTKVMSKSAADLISQARKKGNVVFGEPITASLGIDGTHYWSKNWAKAAAFVTSPPLSPDPTTPDYINSLLASGDLQLSGSAHCTFSTAQKAIGKDNFTAIPEGTNGVEERMSVIWDKAVATGKMDENQFVAVTSTNAAKIFNLYPRKGRISVGSDSDLVIWDPDAVKIVSAKNHQSAAEYNIFEGMELRGAPLVVICQGKIMLEDGNLHVTQGAGRFIPCSPFSDYVYKRIKARRKMADLHAVPRGMYDGPVFDLTTTPKGGTPAGSARGSPTRPNPPVRNLHQSGFSLSGTQVDEGVRSASKRIVAPPGGRSNITSLS

SEQ ID NO: 486 - protein, 4861 aa, Homo sapiens
MATMIPPVKLKWLEHLNSSWITEDSESIATREGVAVLYSKLVSNKEVVPLPQQVLCLKGPQLPDFERESLSSDEQDHYLDALLSSQLALAKMVCSDSPFAGALRKRLLVLQRVFYALSNKYHDKGKVKQQQHSPESSSGSADVHSVSERPRSSTDALIEMGVRTGLSLLFALLRQSWMMPVSGPGLSLCNDVIHTAIEVVSSLPPLSLANESKIPPMGLDCLSQVTTFLKGVTIPNSGADTLGRRLASELLLGLAAQRGSLRYLLEWIEMALGASAVVHTMEKGKLLSSQEGMISFDCFMTILMQMRRSLGSSADRSQWREPTRTSDGLCSLYEAALCLFEEVCRMASDYSRTCASPDSIQTGDAPIVSETCEVYVWGSNSSHQLVEGTQEKILQPKLAPSFSDAQTIEAGQYCTFVISTDGSVRACGKGSYGRLGLGDSNNQSTLKKLTFEPHRSIKKVSSSKGSDGHTLAFTTEGEVFSWGDGDYGKLGHGNSSTQKYPKLIQGPLQGKVVVCVSAGYRHSAAVTEDGELYTWGEGDFGRLGHGDSNSRNIPTLVKDISNVGEVSCGSSHTIALSKDGRTVWSFGGGDNGKLGHGDTNRVYKPKVIEALQGMFIRKVCAGSQSSLALTSTGQVYAWGCGACLGCGSSEATALRPKLIEELAATRIVDVSIGDSHCLALSHDNEVYAWGNNSMGQCGQGNSTGPITKPKKVSGLDGIAIQQISAGTSHSLAWTALPRDRQVVAWHRPYCVDLEESTFSHLRSFLERYCDKINSEIPPLPFPSSREHHSFLKLCLKLLSNHLALALAGGVATSILGRQAGPLRNLLFRLMDSTVPDEIQEVVIETLSVGATMLLPPLRERMELLHSLLPQGPDRWESLSKGQRMQLDIILTSLQDHTHVASLLGYSSPSDAADLSSVCTGYGNLSDQPYGTQSCHPDTHLAEILMKTLLRNLGFYTDQAFGELEKNSDKFLLGTSSSENSQPAHLHELLCSLQKQLLAFCHINNISENSSSVALLHKHLQLLLPHATDIYSRSANLLKESPWNGSVGEKLRDVIYVSAAGSMLCQIVNSLLLLPVSVARPLLSYLLDLLPPLDCLNRLLPAADLLEDQELQWPLHGGPELIDPAGLPLPQPAQSWVWLVDLERTIALLIGRCLGGMLQGSPVSPEEQDTAYWMKTPLFSDGVEMDTPQLDKCMSCLLEVALSGNEEQKPFDYKLRPEIAVYVDLALGCSKEPARSLWISMQDYAVSKDWDSATLSNESLLDTVSRFVLAALLKHTNLLSQACGESRYQPGKHLSEVYRCVYKVRSRLLACKNLELIQTRSSSRDRWISENQDSADVDPQEHSFTRTIDEEAEMEEQAERDREEGHPEPEDEEEEREHEVMTAGKIFQCFLSAREVARSRDRDRMNSGAGSGARADDPPPQSQQERRVSTDLPEGQDVYTAACNSVIHRCALLILGVSPVIDELQKRREEGQLQQPSTSASEGGGLMTRSESLTAESRLVHTSPNYRLIKSRSESDLSQPESDEEGYALSGRQNVDLDLAASHRKRGPMHSQLESLSDSWARLKHSRDWLCNSSYSFESDFDLTKSLGVHTLIENVVSFVSGDVGNAPGFKEPEESMSTSPQASIIAMEQQQLRAELRLEALHQILVLLSGMEEKGSISLAGSRLSSGFQSSTLLTSVRLQFLAGCFGLGTVGHTGAKGESGRLHHYQDGIRAAKRNIQIEIQVAVHKIYQQLSATLERALQANKHHIEAQQRLLLVTVFALSVHYQPVDVSLAISTGLLNVLSQLCGTDTMLGQPLQLLPKTGVSQLSTALKVASTRLLQILAITTGTYADKLSPKVVQSLLDLLCSQLKNLLSQTGVLHMASFGEGEQEDGEEEEKKVDSSGETEKKDFRAALRKQHAAELHLGDFLVFLRRVVSSKAIQSKMASPKWTEVLLNIASQKCSSGIPLVGNLRTRLLALHVLEAVLPACESGVEDDQMAQIVERLFSLLSDCMWETPIAQAKHAIQIKEKEQEIKLQKQGELEEEDENLPIQEVSFDPEKAQCCLVENGQILTHGSGGKGYGLASTGVTSGCYQWKFYIVKENRGNEGTCVGVSRWPVHDFNHRTTSDMWLYRAYSGNLYHNGEQTLTLSSFTQGDFITCVLDMEARTISFGKNGEEPKLAFEDVDAAELYPCVMFYSSNPGEKVKICDMQMRGTPRDLLPGDPICSPVAAVLAEATIQLVRILHRTDRWTYCINKKMMERLHKIKICIKESGQKLKKSRSVQSREENEMREEKESKEEEKGKHTRHGLADLSELQLRTLCIEVWPVLAVIGGVDAGLRVGGRCVHKQTGRHATLLGVVKEGSTSAKVQWDEAEITISFPTFWSPSDTPLYNLEPCEPLPFDVARFRGLTASVLLDLTYLTGVHEDMGKQSTKRHEKKHRHESEEKGDVEQKPESESALDMRTGLTSDDVKSQSTTSSKSENEIASFSLDPTLPSVESQHQITEGKRKNHEHMSKNHDVAQSEIRAVQLSYLYLGAMKSLSALLGCSKYAELLLIPKVLAENGHNSDCASSPVVHEDVEMRAALQFLMRHMVKRAVMRSPIKRALGLADLERAQAMIYKLVVHGLLEDQFGGKIKQEIDQQAEESDPAQQAQTPVTTSPSASSTTSFMSSSLEDTTTATTPVTDTETVPASESPGVMPLSLLRQMFSSYPTTTVLPTRRAQTPPISSLPTSPSDEVGRRQSLTSPDSQSARPANRTALSDPSSRLSTSPPPPAIAVPLLEMGFSLRQIAKAMEATGARGEADAQNITVLAMWMIEHPGHEDEEEPQSGSTADSRPGAAVLGSGGKSNDPCYLQSPGDIPSADAAEMEEGFSESPDNLDHTENAASGSGPSARGRSAVTRRHKFDLAARTLLARAAGLYRSVQAHRNQSRREGISLQQDPGALYDFNLDEELEIDLDDEAMEAMFGQDLTSDNDILGMWIPEVLDWPTWHVCESEDREEVVVCELCECSVVSFNQHMKRNHPGCGRSANRQGYRSNGSYVDGWFGGECGSGNPYYLLCGTCREKYLAMKTKSKSTSSERYKGQAPDLIGKQDSVYEEDWDMLDVDEDEKLTGEEEFELLAGPLGLNDRRIVPEPVQFPDSDPLGASVAMVTATNSMEETLMQIGCHGSVEKSSSGRITLGEQAAALANPHDRVVALRRVTAAAQVLLARTMVMRALSLLSVSGSSCSLAAGLESLGLTDIRTLVRLMCLAAAGRAGLSTSPSAMASTSERSRGGHSKANKPISCLAYLSTAVGCLASNAPSAAKLLVQLCTQNLISAATGVNLTTVDDSIQRKFLPSFLRGIAEENKLVTSPNFVVTQALVALLADKGAKLRPNYDKSEVEKKGPLELANALAACCLSSRLSSQHRQWAAQQLVRTLAAHDRDNQTTLQTLADMGGDLRKCSFIKLEAHQNRVMTCVWCNKKGLLATSGNDGTIRVWNVTKKQYSLQQTCVFNRLEGDAEESLGSPSDPSFSPVSWSISGKYLAGALEKMVNIWQVNGGKGLVDIQPHWVSALAWPEEGPATAWSGESPELLLVGRMDGSLGLIEVVDVSTMHRRELEHCYRKDVSVTCIAWFSEDRPFAVGYFDGKLLLGTKEPLEKGGIVLIDAHKDTLISMKWDPTGHILMTCAKEDSVKLWGSISGCWCCLHSLCHPSIVNGIAWCRLPGKGSKLQLLMATGCQSGLVCVWRIPQDTTQTNVTSAEGWWDQESNCQDGYRKSSGAKCVYQLRGHITPVRTVAFSSDGLALVSGGLGGLMNIWSLRDGSVLQTVVIGSGAIQTTVWIPEVGVAACSNRSKDVLVVNCTAEWAAANHVLATCRTALKQQGVLGLNMAPCMRAFLERLPMMLQEQYAYEKPHVVCGDQLVHSPYMQCLASLAVGLHLDQLLCNPPVPPHHQNCLPDPASWNPNEWAWLECFSTTIKAAEALTNGAQFPESFTVPDLEPVPEDELVFLMDNSKWINGMDEQIMSWATSRPEDWHLGGKCDVYLWGAGRHGQLAEAGRNVMVPAAAPSFSQAQQVICGQNCTFVIQANGTVLACGEGSYGRLGQGNSDDLHVLTVISALQGFVVTQLVTSCGSDGHSMALTESGEVFSWGDGDYGKLGHGNSDRQRRPRQIEALQGEEVVQMSCGFKHSAVVTSDGKLFTFGNGDYGRLGLGNTSNKKLPERVTALEGYQIGQVACGLNHTLAVSADGSMVWAFGDGDYGKLGLGNSTAKSSPQKIDVLCGIGIKKVACGTQFSVALTKDGHVYTFGQDRLIGLPEGRARNHNRPQQIPVLAGVIIEDVAVGAEHTLALASNGDVYAWGSNSEGQLGLGHTNHVREPTLVTGLQGKNVRQISAGRCHSAAWTAPPVPPRAPGVSVPLQLGLPDTVPPQYGALREVSIHTVRARLRLLYHFSDLMYSSWRLLNLSPNNQNSTSHYNAGTWGIVQGQLRPLLAPRVYTLPMVRSIGKTMVQGKNYGPQITVKRISTRGRKCKPIFVQIARQVVKLNASDLRLPSRAWKVKLVGEGADDAGGVFDDTITEMCQELETGIVDLLIPSPNATAEVGYNRDRFLFNPSACLDEHLMQFKFLGILMGVAIRTKKPLDLHLAPLVWKQLCCVPLTLEDLEEVDLLYVQTLNSILHIEDSGITEESFHEMIPLDSFVGQSADGKMVPIIPGGNSIPLTFSNRKEYVERAIEYRLHEMDRQVAAVREGMSWIVPVPLLSLLTAKQLEQMVCGMPEISVEVLKKVVRYREVDEQHQLVQWFWHTLEEFSNEERVLFMRFVSGRSRLPANTADISQRFQIMKVDRPYDSLPTSQTCFFQLRLPPYSSQLVMAERLRYAINNCRSIDMDNYMLSRNVDNAEGSDTDY

SEQ ID NO: 487 - protein, 433 aa, Homo sapiens
MVWKVAVFLSVALGIGAIPIDDPEDGGKHWVVIVAGSNGWYNYRHQADACHAYQIIHRNGIPDEQIVVMMYDDIAYSEDNPTPGIVINRPNGTDVYQGVPKDYTGEDVTPQNFLAVLRGDAEAVKGIGSGKVLKSGPQDHVFIYFTDHGSTGILVFPNEDLHVKDLNETIHYMYKHKMYRKMVFYIEACESGSMMNHLPDNINVYATTAANPRESSYACYYDEKRSTYLGDWYSVNWMEDSDVEDLTKETLHKQYHLVKSHTNTSHVMQYGNKTISTMKVMQFQGMKRKASSPVPLPPVTHLDLTPSPDVPLTIMKRKLMNTNDLEESRQLTEEIQRHLDARHLIEKSVRKIVSLLAASEAEVEQLLSERAPLTGHSCYPEALLHFRTHCFNWHSPTYEYALRHLYVLVNLCEKPYPLHRIKLSMDHVCLGHY

SEQ ID NO: 488 - protein, 118 aa, Homo sapiens
MRRAGLGEGVPPGNYGNYGYANSGYSACEEENERLTESLRSKVTAIKSLSIEIGHEVKTQNKLLAEMDSQFDSTTGFLGKTMGKLKILSRGSQTKLLCYMMLFSLFVFFIIYWIIKLR

SEQ ID NO: 489 - protein, 660 aa, Homo sapiens
MEALMARGALTGPLRALCLLGCLLSHAAAAPSPIIKFPGDVAPKTDKELAVQYLNTFYGCPKESCNLFVLKDTLKKMQKFFGLPQTGDLDQNTIETMRKPRCGNPDVANYNFFPRKPKWDKNQITYRIIGYTPDLDPETVDDAFARAFQVWSDVTPLRFSRIHDGEADIMINFGRWEHGDGYPFDGKDGLLAHAFAPGTGVGGDSHFDDDELWTLGEGQVVRVKYGNADGEYCKFPFLFNGKEYNSCTDTGRSDGFLWCSTTYNFEKDGKYGFCPHEALFTMGGNAEGQPCKFPFRFQGTSYDSCTTEGRTDGYRWCGTTEDYDRDKKYGFCPETAMSTVGGNSEGAPCVFPFTFLGNKYESCTSAGRSDGKMWCATTANYDDDRKWGFCPDQGYSLFLVAAHEFGHAMGLEHSQDPGALMAPIYTYTKNFRLSQDDIKGIQELYGASPDIDLGTGPTPTLGPVTPEICKQDIVFDGIAQIRGEIFFFKDRFIWRTVTPRDKPMGPLLVATFWPELPEKIDAVYEAPQEEKAVFFAGNEYWIYSASTLERGYPKPLTSLGLPPDVQRVDAAFNWSKNKKTYIFAGDKFWRYNEVKKKMDPGFPKLIADAWNAIPDNLDAVVDLQGGGHSYFFKGAYYLKLENQSLKSVKFGSIKSDWLGC

SEQ ID NO: 490 - protein, 961 aa, Homo sapiens
MLAPRGAAVLLLHLVLQRWLAAGAQATPQVFDLLPSSSQRLNPGALLPVLTDPALNDLYVISTFKLQTKSSATIFGLYSSTDNSKYFEFTVMGRLSKAILRYLKNDGKVHLVVFNNLQLADGRRHRILLRLSNLQRGAGSLELYLDCIQVDSVHNLPRAFAGPSQKPETIELRTFQRKPQDFLEELKLVVRGSLFQVASLQDCFLQQSEPLAATGTGDFNRQFLGQMTQLNQLLGEVKDLLRQQVKETSFLRNTIAECQACGPLKFQSPTPSTVVAPAPPAPPTRPPRRCDSNPCFRGVQCTDSRDGFQCGPCPEGYTGNGITCIDVDECKYHPCYPGVHCINLSPGFRCDACPVGFTGPMVQGVGISFAKSNKQVCTDIDECRNGACVPNSICVNTLGSYRCGPCKPGYTGDQIRGCKVERNCRNPELNPCSVNAQCIEERQGDVTCVCGVGWAGDGYICGKDVDIDSYPDEELPCSARNCKKDNCKYVPNSGQEDADRDGIGDACDEDADGDGILNEQDNCVLIHNVDQRNSDKDIFGDACDNCLSVLNNDQKDTDGDGRGDACDDDMDGDGIKNILDNCPKFPNRDQRDKDGDGVGDACDSCPDVSNPNQSDVDNDLVGDSCDTNQDSDGDGHQDSTDNCPTVINSAQLDTDKDGIGDECDDDDDNDGIPDLVPPGPDNCRLVPNPAQEDSNSDGVGDICESDFDQDQVIDRIDVCPENAEVTLTDFRAYQTVGLDPEGDAQIDPNWVVLNQGMEIVQTMNSDPGLAVGYTAFNGVDFEGTFHVNTQTDDDYAGFIFGYQDSSSFYVVMWKQTEQTYWQATPFRAVAEPGIQLKAVKSKTGPGEHLRNSLWHTGDTSDQVRLLWKDSRNVGWKDKVSYRWFLQHRPQVGYIRVRFYEGSELVADSGVTIDTTMRGGRLGVFCFSQENIIWSNLKYRCNDTIPEDFQEFQTQNFDRFDN

SEQ ID NO: 491 - protein, 1464 aa, Homo sapiens
MFSFVDLRLLLLLAATALLTHGQEEGQVEGQDEDIPPITCVQNGLRYHDRDVWKPEPCRICVCDNGKVLCDDVICDETKNCPGAEVPEGECCPVCPDGSESPTDQETTGVEGPKGDTGPRGPRGPAGPPGRDGIPGQPGLPGPPGPPGPPGPPGLGGNFAPQLSYGYDEKSTGGISVPGPMGPSGPRGLPGPPGAPGPQGFQGPPGEPGEPGASGPMGPRGPPGPPGKNGDDGEAGKPGRPGERGPPGPQGARGLPGTAGLPGMKGHRGFSGLDGAKGDAGPAGPKGEPGSPGENGAPGQMGPRGLPGERGRPGAPGPAGARGNDGATGAAGPPGPTGPAGPPGFPGAVGAKGEAGPQGPRGSEGPQGVRGEPGPPGPAGAAGPAGNPGADGQPGAKGANGAPGIAGAPGFPGARGPSGPQGPGGPPGPKGNSGEPGAPGSKGDTGAKGEPGPVGVQGPPGPAGEEGKRGARGEPGPTGLPGPPGERGGPGSRGFPGADGVAGPKGPAGERGSPGPAGPKGSPGEAGRPGEAGLPGAKGLTGSPGSPGPDGKTGPPGPAGQDGRPGPPGPPGARGQAGVMGFPGPKGAAGEPGKAGERGVPGPPGAVGPAGKDGEAGAQGPPGPAGPAGERGEQGPAGSPGFQGLPGPAGPPGEAGKPGEQGVPGDLGAPGPSGARGERGFPGERGVQGPPGPAGPRGANGAPGNDGAKGDAGAPGAPGSQGAPGLQGMPGERGAAGLPGPKGDRGDAGPKGADGSPGKDGVRGLTGPIGPPGPAGAPGDKGESGPSGPAGPTGARGAPGDRGEPGPPGPAGFAGPPGADGQPGAKGEPGDAGAKGDAGPPGPAGPAGPPGPIGNVGAPGAKGARGSAGPPGATGFPGAAGRVGPPGPSGNAGPPGPPGPAGKEGGKGPRGETGPAGRPGEVGPPGPPGPAGEKGSPGADGPAGAPGTPGPQGIAGQRGVVGLPGQRGERGFPGLPGPSGEPGKQGPSGASGERGPPGPMGPPGLAGPPGESGREGAPAAEGSPGRDGSPGAKGDRGETGPAGPPGAPGAPGAPGPVGPAGKSGDRGETGPAGPAGPVGPVGARGPAGPQGPRGDKGETGEQGDRGIKGHRGFSGLQGPPGPPGSPGEQGPSGASGPAGPRGPPGSAGAPGKDGLNGLPGPIGPPGPRGRTGDAGPVGPPGPPGPPGPPGPPSAGFDFSFLPQPPQEKAHDGGRYYRADDANVVRDRDLEVDTTLKSLSQQIENIRSPEGSRKNPARTCRDLKMCHSDWKSGEYWIDPNQGCNLDAIKVFCNMETGETCVYPTQPSVAQKNWYISKNPKDKRHVWFGESMTDGFQFEYGGQGSDPADVAIQLTFLRLMSTEASQNITYHCKNSVAYMDQQTGNLKKALLLKGSNEIEIRAEGNSRFTYSVTVDGCTSHTGAWGKTVIEYKTTKSSRLPIIDVAPLDVGAPDQEFGFDVGPVCFL

SEQ ID NO: 492 - protein, 272 aa, Homo sapiens
MVLLTAVLLLLAAYAGPAQSLGSFVHCEPCDEKALSMCPPSPLGCELVKEPGCGCCMTCALAEGQSCGVYTERCAQGLRCLPRQDEEKPLHALLHGRGVCLNEKSYREQVKIERDSREHEEPTTSEMAEETYSPKIFRPKHTRISELKAEAVKKDRRKKLTQSKFVGGAENTAHPRIISAPEMRQESEQGPCRRHMEASLQELKASPRMVPRAVYLPNCDRKGFYKRKQCKPSRGRKRGICWCVDKYGMKLPGMEYVDGDFQCHTFDSSNVE

SEQ ID NO: 493 - protein, 338 aa, Homo sapiens
MSLSAFTLFLALIGGTSGQYYDYDFPLSIYGQSSPNCAPECNCPESYPSAMYCDELKLKSVPMVPPGIKYLYLRNNQIDHIDEKAFENVTDLQWLILDHNLLENSKIKGRVFSKLKQLKKLHINHNNLTESVGPLPKSLEDLQLTHNKITKLGSFEGLVNLTFIHLQHNRLKEDAVSAAFKGLKSLEYLDLSFNQIARLPSGLPVSLLTLYLDNNKISNIPDEYFKRFNALQYLRLSHNELADSGIPGNSFNVSSLVELDLSYNKLKNIPTVNENLENYYLEVNQLEKFDIKSFCKILGPLSYSKIKHLRLDGNRISETSLPPDMYECLRVANEVTLN

SEQ ID NO: 494 - protein, 1466 aa, Homo sapiens; identical to SEQ ID NO: 451

SEQ ID NO: 495 - protein, 142 aa, Homo sapiens
MDMGLREMCVGEKRTVIIPPHLGYGEAGVDGEVPGSAVLVFDIELLELVAGLPEGYMFIWNGEVSPNLFEEIDKDGNGEVLLEEFSEYIHAQVASGKGKLAPGFDAELIVKNMFTNQDRNGDGKVTAEEFKLKDQEAKQDEL

SEQ ID NO: 496 - protein, 202 aa, Homo sapiens
MMQDVSSSPVSPADDSLSNSEEEPDRQQPPSGKRGGRKRRSSRRSAGGGAGPGGAAGGGVGGGDEPGSPAQGKRGKKSAGCGGGGGAGGGGGSSSGGGSPQSYEELQTQRVMANVRERQRTQSLNEAFAALRKIIPTLPSDKLSKIQTLKLAARYIDFLYQVLQSDELDSKMASCSYVAHERLSYAFSVWRMEGAWSMSASH

SEQ ID NO: 497 - protein, 339 aa, Homo sapiens
MSTVHEILCKLSLEGDHSTPPSAYGSVKAYTNFDAERDALNIETAIKTKGVDEVTIVNILTNRSNAQRQDIAFAYQRRTKKELASALKSALSGHLETVILGLLKTPAQYDASELKASMKGLGTDEDSLIEIICSRTNQELQEINRVYKEMYKTDLEKDIISDTSGDFRKLMVALAKGRRAEDGSVIDYELIDQDARDLYDAGVKRKGTDVPKWISIMTERSVPHLQKVFDRYKSYSPYDMLESIRKEVKGDLENAFLNLVQCIQNKPLYFADRLYDSMKGKGTRDKVLIRIMVSRSEVDMLKIRSEFKRKYGKSLYYYIQQDTKGDYQKALLYLCGGDD

SEQ ID NO: 498 - protein, 1806 aa, Homo sapiens
MEPWSSRWKTKRWLWDFTVTTLALTFLFQAREVRGAAPVDVLKALDFHNSPEGISKTTGFCTNRKNSKGSDTAYRVSKQAQLSAPTKQLFPGGTFPEDFSILFTVKPKKGIQSFLLSIYNEHGIQQIGVEVGRSPVFLFEDHTGKPAPEDYPLFRTVNIADGKWHRVAISVEKKTVTMIVDCKKKTTKPLDRSERAIVDTNGITVFGTRILDEEVFEGDIQQFLITGDPKAAYDYCEHYSPDCDSSAPKAAQAQEPQIDEYAPEDIIEYDYEYGEAEYKEAESVTEGPTVTEETIAQTEANIVDDFQEYNYGTMESYQTEAPRHVSGTNEPNPVEEIFTEEYLTGEDYDSQRKNSEDTLYENKEIDGRDSDLLVDGDLGEYDFYEYKEYEDKPTSPPNEEFGPGVPAETDITETSINGHGAYGEKGQKGEPAVVEPGMLVEGPPGPAGPAGIMGPPGLQGPTGPPGDPGDRGPPGRPGLPGADGLPGPPGTMLMLPFRYGGDGSKGPTISAQEAQAQAILQQARIALRGPPGPMGLTGRPGPVGGPGSSGAKGESGDPGPQGPRGVQGPPGPTGKPGKRGRPGADGGRGMPGEPGAKGDRGFDGLPGLPGDKGHRGERGPQGPPGPPGDDGMRGEDGEIGPRGLPGEAGPRGLLGPRGTPGAPGQPGMAGVDGPPGPKGNMGPQGEPGPPGQQGNPGPQGLPGPQGPIGPPGEKGPQGKPGLAGLPGADGPPGHPGKEGQSGEKGALGPPGPQGPIGYPGPRGVKGADGVRGLKGSKGEKGEDGFPGFKGDMGLKGDRGEVGQIGPRGEDGPEGPKGRAGPTGDPGPSGQAGEKGKLGVPGLPGYPGRQGPKGSTGFPGFPGANGEKGARGVAGKPGPRGQRGPTGPRGSRGARGPTGKPGPKGTSGGDGPPGPPGERGPQGPQGPVGFPGPKGPPGPPGRMGCPGHPGQRGETGFQGKTGPPGPGGVVGPQGPTGETGPIGERGHPGPPGPPGEQGLPGAAGKEGAKGDPGPQGISGKDGPAGLRGFPGERGLPGAQGAPGLKGGEGPQGPPGPVGSPGERGSAGTAGPIGLPGRPGPQGPPGPAGEKGAPGEKGPQGPAGRDGVQGPVGLPGPAGPAGSPGEDGDKGEIGEPGQKGSKGDKGENGPPGPPGLQGPVGAPGIAGGDGEPGPRGQQGMFGQKGDEGARGFPGPPGPIGLQGLPGPPGEKGENGDVGPWGPPGPPGPRGPQGPNGADGPQGPPGSVGSVGGVGEKGEPGEAGNPGPPGEAGVGGPKGERGEKGEAGPPGAAGPPGAKGPPGDDGPKGNPGPVGFPGDPGPPGELGPAGQDGVGGDKGEDGDPGQPGPPGPSGEAGPPGPPGKRGPPGAAGAEGRQGEKGAKGEAGAEGPPGKTGPVGPQGPAGKPGPEGLRGIPGPVGEQGLPGAAGQDGPPGPMGPPGLPGLKGDPGSKGEKGHPGLIGLIGPPGEQGEKGDRGLPGTQGSPGAKGDGGIPGPAGPLGPPGPPGLPGPQGPKGNKGSTGPAGQKGDSGLPGPPGPPGPPGEVIQPLPILSSKKTRRHTEGMQADADDNILDYSDGMEEIFGSLNSLKQDIEHMKFPMGTQTNPARTCKDLQLSHPDFPDGEYWIDPNQGCSGDSFKVYCNFTSGGETCIYPDKKSEGVRISSWPKEKPGSWFSEFKRGKLLSYLDVEGNSINMVQMTFLKLLTASARQNFTYHCHQSAAWYDVSSGSYDKALRFLGSNDEEMSYDNNPFIKTLYDGCTSRKGYEKTVIEINTPKIDQVPIVDVMINDFGDQNQKFGFEVGPVCFLG

SEQ ID NO: 499 - protein, 799 aa, Homo sapiens
MPRAPAPLYACLLGLCALLPRLAGLNICTSGSATSCEECLLIHPKCAWCSKEDFGSPRSITSRCDLRANLVKNGCGGEIESPASSFHVLRSLPLSSKGSGSAGWDVIQMTPQEIAVNLRPGDKTTFQLQVRQVEDYPVDLYYLMDLSLSMKDDLDNIRSLGTKLAEEMRKLTSNFRLGFGSFVDKDISPFSYTAPRYQTNPCIGYKLFPNCVPSFGFRHLLPLTDRVDSFNEEVRKQRVSRNRDAPEGGFDAVLQAAVCKEKIGWRKDALHLLVFTTDDVPHIALDGKLGGLVQPHDGQCHLNEANEYTASNQMDYPSLALLGEKLAENNINLIFAVTKNHYMLYKNFTALIPGTTVEILDGDSKNIIQLIINAYNSIRSKVELSVWDQPEDLNLFFTATCQDGVSYPGQRKCEGLKIGDTASFEVSLEARSCPSRHTEHVFALRPVGFRDSLEVGVTYNCTCGCSVGLEPNSARCNGSGTYVCGLCECSPGYLGTRCECQDGENQSVYQNLCREAEGKPLCSGRGDCSCNQCSCFESEFGKIYGPFCECDNFSCARNKGVLCSGHGECHCGECKCHAGYIGDNCNCSTDISTCRGRDGQICSERGHCLCGQCQCTEPGAFGEMCEKCPTCPDACSTKRDCVECLLLHSGKPDNQTCHSLCRDEVITWVDTIVKDDQEAVLCFYKTAKDCVMMFTYVELPSGKSNLTVLREPECGNTPNAMTILLAVVGSILLVGLALLAIWKLLVTIHDRREFAKFQSERSRARYEMASNPLYRKPISTHTVDFTFNKFNKSYNGTVD

SEQ ID NO: 500 - protein, 1496 aa, Homo sapiens
MMANWAEARPLLILIVLLGQFVSIKAQEEDEDEGYGEEIACTQNGQMYLNRDIWKPAPCQICVCDNGAILCDKIECQDVLDCADPVTPPGECCPVCSQTPGGGNTNFGRGRKGQKGEPGLVPVVTGIRGRPGPAGPPGSQGPRGERGPKGRPGPRGPQGIDGEPGVPGQPGAPGPPGHPSHPGPDGLSRPFSAQMAGLDEKSGLGSQVGLMPGSVGPVGPRGPQGLQGQQGGAGPTGPPGEPGDPGPMGPIGSRGPEGPPGKPGEDGEPGRNGNPGEVGFAGSPGARGFPGAPGLPGLKGHRGHKGLEGPKGEVGAPGSKGEAGPTGPMGAMGPLGPRGMPGERGRLGPQGAPGQRGAHGMPGKPGPMGPLGIPGSSGFPGNPGMKGEAGPTGARGPEGPQGQRGETGPPGPVGSPGLPGAIGTDGTPGPKGPTGSPGTSGPPGSAGPPGSPGPQGSTGPQGNSGLPGDPGFKGEAGPKGEPGPHGIQGPIGPPGEEGKRGPRGDPGTLGPPGPVGERGAPGNRGFPGSDGLPGPKGAQGERGPVGSSGPKGSQGDPGRPGEPGLPGARGLTGNPGVQGPEGKLGPLGAPGEDGRPGPPGSIGIKGQPGTMGLPGPKGSNGDPGKPGEAGNPGVPGQRGAPGKDGKVGPYGPPGPPGLRGERGEQGPPGPTGFQGHPGPPGPPGEGGKPGDQGVPGGPGAVGPLGPRGERGNPGERGEPGITGLPGEKGMAGGHGPDGPKGSPGPSGTPGDTGPPGLQGMPGERGIAGTPGPKGDRGGIGEKGAEGTAGNDGAGGLPGPLGPPGPAGLLGEKGEPGPRGLVGPPGSRGNPGSRGENGPTGAVGFAGPQGSDGQPGVKGEPGEPGQKGDAGSPGPQGLAGSPGPHGPNGVPGLKGGRGTQGPPGATGFPGSAGRVGPPGPAGAPGPAGPLGEPGKEGPPGPRGDPGSHGRVGVRGPAGPPGGPGDKGDPGEDGQPGPDGPPGPAGTTGQRGIVGMPGQRGERGMPGLPGPAGTPGKVGPTGATGDKGPPGPVGPPGSNGPVGEPGPEGPAGNDGTPGRDGAVGERGDRGDPGPAGLPGSQGAPGTPGPVGAPGDAGQRGDPGSRGPIGHLGRAGKRGLPGPQGPRGDKGDHGDRGDRGQKGHRGFTGLQGLPGPPGPNGEQGSAGIPGPFGPRGPPGPVGPSGKEGNPGPLGPLGPPGVRGSVGEAGPEGPPGEPGPPGPPGPPGHLTAALGDIMGHYDESMPDPLPEFTEDQAAPDDKNKTDPGVHATLKSLSSQIETMRSPDGSKKHPARTCDDLKLCHSAKQSGEYWIDPNQGSVEDAIKVYCNMETGETCISANPSSVPRKTWWASKSPDNKPVWYGLDMNRGSQFAYGDHQSPNTAITQMTFLRLLSKEASQNITYICKNSVGYMDDQAKNLKKAVVLKGANDLDIKAEGNIRFRYIVLQDTCSKRNGNVGKTVFEYRTQNVARLPIIDLAPVDVGGTDQEFGVEIGPVCFV

SEQ ID NO: 501 - protein, 398 aa, Homo sapiens
MNWHLPLFLLASVTLPSICSHFNPLSLEELGSNTGIQVFNQIVKSRPHDNIVISPHGIASVLGMLQLGADGRTKKQLAMVMRYGVNGVGKILKKINKAIVSKKNKDIVTVANAVFVKNASEIEVPFVTRNKDVFQCEVRNVNFEDPASACDSINAWVKNETRDMIDNLLSPDLIDGVLTRLVLVNAVYFKGLWKSRFQPENTKKRTFVAADGKSYQVPMLAQLSVFRCGSTSAPNDLWYNFIELPYHGESISMLIALPTESSTPLSAIIPHISTKTIDSWMSIMVPKRVQVILPKFTAVAQTDLKEPLKVLGITDMFDSSKANFAKITTGSENLHVSHILQKAKIEVSEDGTKASAATTAILIARSSPPWFIVDRPFLFFIRHNPTGAVLFMGQINKP

SEQ ID NO: 502 - protein, 173 aa, Homo sapiens
MSLLGPKVLLFLAAFIITSDWIPLGVNSQRGDDVTQATPETFTEDPNLVNDPATDETVLAVLADIAPSTDDLASLSEKNTTAECWDEKFTCTRLYSVHRPVKQCIHQLCFTSLRRMYIVNKEICSRLVCKEHEAMKDELCRQMAGLPPRRLRRSNYFRLPPCENVDLQRPNGL

SEQ ID NO: 503 - protein, 3176 aa, Homo sapiens
MRKHRHLPLVAVFCLFLSGFPTTHAQQQQADVKNGAAADIIFLVDSSWTIGEEHFQLVREFLYDVVKSLAVGENDFHFALVQFNGNPHTEFLLNTYRTKQEVLSHISNMSYIGGTNQTGKGLEYIMQSHLTKAAGSRAGDGVPQVIVVLTDGHSKDGLALPSAELKSADVNVFAIGVEDADEGALKEIASEPLNMHMFNLENFTSLHDIVGNLVSCVHSSVSPERAGDTETLKDITAQDSADIIFLIDGSNNTGSVNFAVILDFLVNLLEKLPIGTQQIRVGVVQFSDEPRTMFSLDTYSTKAQVLGAVKALGFAGGELANIGLALDFVVENHFTRAGGSRVEEGVPQVLVLISAGPSSDEIRYGVVALKQASVFSFGLGAQAASRAELQHIATDDNLVFTVPEFRSFGDLQEKLLPYIVGVAQRHIVLKPPTIVTQVIEVNKRDIVFLVDGSSALGLANFNAIRDFIAKVIQRLEIGQDLIQVAVAQYADTVRPEFYFNTHPTKREVITAVRKMKPLDGSALYTGSALDFVRNNLFTSSAGYRAAEGIPKLLVLITGGKSLDEISQPAQELKRSSIMAFAIGNKGADQAELEEIAFDSSLVFIPAEFRAAPLQGMLPGLLAPLRTLSGTPEVHSNKRDIIFLLDGSANVGKTNFPYVRDFVMNLVNSLDIGNDNIRVGLVQFSDTPVTEFSLNTYQTKSDILGHLRQLQLQGGSGLNTGSALSYVYANHFTEAGGSRIREHVPQLLLLLTAGQSEDSYLQAANALTRAGILTFCVGASQANKAELEQIAFNPSLVYLMDDFSSLPALPQQLIQPLTTYVSGGVEEVPLAQPESKRDILFLFDGSANLVGQFPVVRDFLYKIIDELNVKPEGTRIAVAQYSDDVKVESRFDEHQSKPEILNLVKRMKIKTGKALNLGYALDYAQRYIFVKSAGSRIEDGVLQFLVLLVAGRSSDRVDGPASNLKQSGVVPFIFQAKNADPAELEQIVLSPAFILAAESLPKIGDLHPQIVNLLKSVHNGAPAPVSGEKDVVFLLDGSEGVRSGFPLLKEFVQRVVESLDVGQDRVRVAVVQYSDRTRPEFYLNSYMNKQDVVNAVRQLTLLGGPTPNTGAALEFVLRNILVSSAGSRITEGVPQLLIVLTADRSGDDVRNPSVVVKRGGAVPIGIGIGNADITEMQTISFIPDFAVAIPTFRQLGTVQQVISERVTQLTREELSRLQPVLQPLPSPGVGGKRDVVFLIDGSQSAGPEFQYVRTLIERLVDYLDVGFDTTRVAVIQFSDDPKAEFLLNAHSSKDEVQNAVQRLRPKGGRQINVGNALEYVSRNIFKRPLGSRIEEGVPQFLVLISSGKSDDEVVVPAVELKQFGVAPFTIARNADQEELVKISLSPEYVFSVSTFRELPSLEQKLLTPITTLTSEQIQKLLASTRYPPPAVESDAADIVFLIDSSEGVRPDGFAHIRDFVSRIVRRLNIGPSKVRVGVVQFSNDVFPEFYLKTYRSQAPVLDAIRRLRLRGGSPLNTGKALEFVARNLFVKSAGSRIEDGVPQHLVLVLGGKSQDDVSRFAQVIRSSGIVSLGVGDRNIDRTELQTITNDPRLVFTVREFRELPNIEERIMNSFGPSAATPAPPGVDTPPPSRPEKKKADIVFLLDGSINFRRDSFQEVLRFVSEIVDTVYEDGDSIQVGLVQYNSDPTDEFFLKDFSTKRQIIDAINKVVYKGGRHANTKVGLEHLRVNHFVPEAGSRLDQRVPQIAFVITGGKSVEDAQDVSLALTQRGVKVFAVGVRNIDSEEVGKIASNSATAFRVGNVQELSELSEQVLETLHDAMHETLCPGVTDAAKACNLDVILGFDGSRDQNVFVAQKGFESKVDAILNRISQMHRVSCSGGRSPTVRVSVVANTPSGPVEAFDFDEYQPEMLEKFRNMRSQHPYVLTEDTLKVYLNKFRQSSPDSVKVVIHFTDGADGDLADLHRASENLRQEGVRALILVGLERVVNLERLMHLEFGRGFMYDRPLRLNLLDLDYELAEQLDNIAEKACCGVPCKCSGQRGDRGPIGSIGPKGIPGEDGYRGYPGDEGGPGERGPPGVNGTQGFQGCPGQRGVKGSRGFPGEKGEVGEIGLDGLDGEDGDKGLPGSSGEKGNPGRRGDKGPRGEKGERGDVGIRGDPGNPGQDSQERGPKGETGDLGPMGVPGRDGVPGGPGETGKNGGFGRRGPPGAKGNKGGPGQPGFEGEQGTRGAQGPAGPAGPPGLIGEQGISGPRGSGGARGAPGERGRTGPLGRKGEPGEPGPKGGIGNPGPRGETGDDGRDGVGSEGRRGKKGERGFPGYPGPKGNPGEPGLNGTTGPKGIRGRRGNSGPPGIVGQKGRPGYPGPAGPRGNRGDSIDQCALIQSIKDKCPCCYGPLECPVFPTELAFALDTSEGVNQDTFGRMRDVVLSIVNVLTIAESNCPTGARVAVVTYNNEVTTEIRFADSKRKSVLLDKIKNLQVALTSKQQSLETAMSFVARNTFKRVRNGFLMRKVAVFFSNTPTRASPQLREAVLKLSDAGITPLFLTRQEDRQLINALQINNTAVGHALVLPAGRDLTDFLENVLTCHVCLDICNIDPSCGFGSWRPSFRDRRAAGSDVDIDMAFILDSAETTTLFQFNEMKKYIAYLVRQLDMSPDPKASQHFARVAVVQHAPSESVDNASMPPVKVEFSLTDYGSKEKLVDFLSRGMTQLQGTRALGSAIEYTIENVFESAPNPRDLKIVVLMLTGEVPEQQLEEAQRVILQAKCKGYFFVVLGIGRKVNIKEVYTFASEPNDVFFKLVDKSTELNEEPLMRFGRLLPSFVSSENAFYLSPDIRKQCDWFQGDQPTKNLVKFGHKQVNVPNNVTSSPTSNPVTTTKPVTTTKPVTTTTKPVTTTTKPVTIINQPSVKPAAAKPAPAKPVAAKPVATKTATVRPPVAVKPATAAKPVAAKPAAVRPPAAAAKPVATKPEVPRPQAAKPAATKPATTKPVVKMLREVQVFEITENSAKLHWERPEPPGPYFYDLTVTSAHDQSLVLKQNLTVTDRVIGGLLAGQTYHVAVVCYLRSQVRATYHGSFSTKKSQPPPPQPARSASSSTINLMVSTEPLALTETDICKLPKDEGTCRDFILKWYYDPNTKSCARFWYGGCGGNENKFGSQKECEKVCAPVLAKPGVISVMGT

SEQ ID NO: 504 - protein, 263 aa, Homo sapiens
MVKIAFNTPTAVQKEEARQDVEALLSRTVRTQILTGKELRVATQEKEGSSGRCMLTLLGLSFILAGLIVGGACIYKYFMPKSTIYRGEMCFFDSEDPANSLRGGEPNFLPVTEEADIREDDNIAIIDVPVPSFSDSDPAAIIHDFEKGMTAYLDLLLGNCYLMPLNTSIVMPPKNLVELFGKLASGRYLPQTYVVREDLVAVEEIRDVSNLGIFIYQLCNNRKSFRLRRRDLLLGFNKRAIDKCWKIRHFPNEFIVETKICQE

SEQ ID NO: 505 - protein, 403 aa, Homo sapiens
MSHRKFSAPRHGSLGFLPRKRSSRHRGKVKSFPKDDPSKPVHLTAFLGYKAGMTHIVREVDRPGSKVNKKEVVEAVTIVETPPMVVVGIVGYVETPRGLRTFKTVFAEHISDECKRRFYKNWHKSKKKAFTKYCKKWQDEDGKKQLEKDFSSMKKYCQVIRVIAHTQMRLLPLRQKKAHLMEIQVNGGTVAEKLDWARERLEQQVPVNQVFGQDEMIDVIGVTKGKGYKGVTSRWHTKKLPRKTHRGLRKVACIGAWHPARVAFSVARAGQKGYHHRTEINKKIYKIGQGYLIKDGKLIKNNASTDYDLSDKSINPLGGFVHYGEVTNDFVMLKGCVVGTKKRVLTLRKSLLVQTKRRALEKIDLKFIDTTSKFGHGRFQTMEEKKAFMGPLKKDRIAKEEGA

SEQ ID NO: 506 - protein, 300 aa, Homo sapiens
MRIAVICFCLLGITCAIPVKQADSGSSEEKQLYNKYPDAVATWLNPDPSQKQNLLAPQTLPSKSNESHDHMDDMDDEDDDDHVDSQDSIDSNDSDDVDDTDDSHQSDESHHSDESDELVTDFPTDLPATEVFTPVVPTVDTYDGRGDSVVYGLRSKSKKFRRPDIQYPDATDEDITSHMESEELNGAYKAIPVAQDLNAPSDWDSRGKDSYETSQLDDQSAETHSHKQSRLYKRKANDESNEHSDVIDSQELSKVSREFHSHEFHSHEDMLVVDPKSKEEDKHLKFRISHELDSASSEVN

SEQ ID NO: 507 - protein, 427 aa, Homo sapiens
MRHLGAFLFLLGVLGALTEMCEIPEMDSHLVEKLGQHLLPWMDRLSLEHLNPSIYVGLRLSSLQAGTKEDLYLHSLKLGYQQCLLGSAFSEDDGDCQGKPSMGQLALYLLALRANCEFVRGHKGDRLVSQLKWFLEDEKRAIGHDHKGHPHTSYYQYGLGILALCLHQKRVHDSVVDKLLYAVEPFHQGHHSVDTAAMAGLAFTCLKRSNFNPGRRQRITMAIRTVREEILKAQTPEGHFGNVYSTPLALQFLMTSPMRGAELGTACLKARVALLASLQDGAFQNALMISQLLPVLNHKTYIDLIFPDCLAPRVMLEPAAETIPQTQEIISVTLQVLSLLPPYRQSISVLAGSTVEDVLKKAHELGGFTYETQASLSGPYLTSVMGKAAGEREFWQLLRDPNTPLLQGIADYRPKDGETIELRLVSW

SEQ ID NO: 508 - protein, 822 aa, Homo sapiens [sequence omitted]

SEQ ID NO: 509 - protein, 932 aa, Homo sapiens
MIPARLHRDYKGLVLLGILLGTLWETGCTQIRYSVPEELEKGSRVGDISRDLGLEPRELAERGVRIIPRGRTQLFALNPRSGSLVTAGRIDREELCMGAIKCQLNLDILMEDKVKIYGVEVEVRDINDNAPYFRESELEIKISENAATEMRFPLPHAWDPDIGKNSLQSYELSPNTHFSLIVQNGADGSKYPELVLKRALDREEKAAHHLVLTASDGGDPVRTGTARIRVMVLDANDNAPAFAQPEYRASVPENLALGTQLLVVNATDPDEGVNAEVRYSFRYVDDKAAQVFKLDCNSGTISTIGELDHEESGFYQMEVQAMDNAGYSARAKVLITVLDVNDNAPEVVLTSLASSVPENSPRGTLIALLNVNDQDSEENGQVICFIQGNLPFKLEKSYGNYYSLVTDIVLDREQVPSYNITVTATDRGTPPLSTETHISLNVADTNDNPPVFPQASYSAYIPENNPRGVSLVSVTAHDPDCEENAQITYSLAENTIQGASLSSYVSINSDTGVLYALSSFDYEQFRDLQVKVMARDNGHPPLSSNVSLSLFVLDQNDNAPEILYPALPTDGSTGVELAPRSAEPGYLVTKVVAVDRDSGQNAWLSYRLLKASEPGLFSVGLHTGEVRTARALLDRDALKQSLVVAVQDHGQPPLSATVTLTVAVADSIPQVLADLGSLESPANSETSDLTLYLVVAVAAVSCVFLAFVILLLALRLRRWHKSRLLQASGGGLTGAPASHFVGVDGVQAFLQTYSHEVSLTTDSRKSHLIFPQPNYADMLVSQESFEKSEPLLLSGDSVFSKDSHGLIEQAPPNTDWRFSQAQRPGTSGSQNGDDTGTWPNNQFDTEMLQAMILASASEAADGSSTLGGGAGTMGLSARYGPQFTLQHVPDYRQNVYIPGSNATLTNAAGKRDGKAPAGGNGNKKKSGKKEKK

SEQ ID NO: 510 - protein, 261 aa, Homo sapiens [sequence omitted]

SEQ ID NO: 511 - protein, 822 aa, Homo sapiens [sequence omitted]

SEQ ID NO: 512 - protein, 115 aa, Homo sapiens
MRYVASYLLAALGGNSSPSAKDIKKILDSVGIEADDDRLNKVISELNGKNIEDVIAQGIGKLASVPAGGAVAVSAAPGSAAPAAGSAPAAAEEKKDEKKEESEESDDDMGFGLFD

SEQ ID NO: 513 - protein, 170 aa, Homo sapiens
MKTQRNGHSLGRWSLVLLLLGLVMPLAIIAQVLSYKEAVLRAIDGINQRSSDANLYRLLDLDPRPTMDGDPDTPKPVSFTVKETVCPRTTQQSPEDCDFKKDGLVKRCMGTVTLNQARGSFDISCDKDNKRFALLGDFFRKSKEKIGKEFKRIVQRIKDFLRNLVPRTES

SEQ ID NO: 514 - protein, 332 aa, Homo sapiens; identical to SEQ ID NO: 421

SEQ ID NO: 515 - protein, 217 aa, Homo sapiens; identical to SEQ ID NO: 422

SEQ ID NO: 516 - protein, 764 aa, Homo sapiens; identical to SEQ ID NO: 423

SEQ ID NO: 517 - protein, 191 aa, Homo sapiens
MQTIKCVVVGDGAVGKTCLLISYTTNKFPSEYVPTVFDNYAVTVMIGGEPYTLGLFDTAGQEDYDRLRPLSYPQTDVFLVCFSVVSPSSFENVKEKWVPEITHHCPKTPFLLVGTQIDLRDDPSTIEKLAKNKQKPITPETAEKLARDLKAVKYVECSALTQKGLKNVFDEAILAALEPPEPKKSRRCVLL

SEQ ID NO: 518 - protein, 674 aa, Homo sapiens
MAAFSVGTAMNASSYSAEMTEPKSVCVSVDEVVSSNMEATETDLLNGHLKKVDNNLTEAQRFSSLPRRAAVNIEFRDLSYSVPEGPWWRKKGYKTLLKGISGKFNSGELVAIMGPSGAGKSTLMNILAGYRETGMKGAVLINGLPRDLRCFRKVSCYIMQDDMLLPHLTVQEAMMVSAHLKLQEKDEGRREMVKEILTALGLLSCANTRTGSLSGGQRKRLAIALELVNNPPVMFFDEPTSGLDSASCFQVVSLMKGLAQGGRSIICTIHQPSAKLFELFDQLYVLSQGQCVYRGKVCNLVPYLRDLGLNCPTYHNPADFVMEVASGEYGDQNSRLVRAVREGMCDSDHKRDLGGDAEVNPFLWHRPSEEVKQTKRLKGLRKDSSSMEGCHSFSASCLTQFCILFKRTFLSIMRDSVLTHLRITSHIGIGLLIGLLYLGIGNETKKVLSNSGFLFFSMLFLMFAALMPTVLTFPLEMGVFLREHLNYWYSLKAYYLAKTMADVPFQIMFPVAYCSIVYWMTSQPSDAVRFVLFAALGTMTSLVAQSLGLLIGAASTSLQVATFVGPVTAIPVLLFSGFFVSFDTIPTYLQWMSYISYVRYGFEGVILSIYGLDREDLHCDIDETCHFQKSEAILRELDVENAKLYLDFIVLGIFFISLRLIAYLVLRYKIRAER

SEQ ID NO: 519 - protein, 418 aa, Homo sapiens
MFKGILQSGLDNFVINHMLKNNVAGQTSIQTLVPNTDQKSTSVKKDNHKKKTVKMLEYLGKDVLHGVFNYLAKHDVLTLKEEEKKKYYDAKIEDKALILVDSLRKNRVAHQMFTQTLLNMDQKITSVKPLLQIEAGPPESAESTNILKLCPREEFLRLCKKNHDEIYPIKKREDRRRLALIICNTKFDHLPARNGAHYDIVGMKRLLQGLGYTVVDEKNLTARDMESVLRAFAARPEHKSSDSTFLVLMSHGILEGICGTAHKKKKPDVLLYDTIFQIFNNRNCLSLKDKPKVIIVQACRGEKHGELWVRDSPASLAVISSQSSENLEADSVCKIHEEKDFIAFCSSTPHNVSWRDRTRGSIFITELITCFQKYSCCCHLMEIFRKVQKSFEVPQAKAQMPTIERATLTRDFYLFPGN

SEQ ID NO: 520 - protein, 641 aa, Homo sapiens
MGPPLKLFKNQKYQELKQECIKDSRLFCDPTFLPENDSLFYNRLLPGKVVWKRPQDICDDPHLIVGNISNHQLTQGRLGHKPMVSAFSCLAVQESHWTKTIPNHKEQEWDPQKTEKYAGIFHFRFWHFGEWTEVVIDDLLPTINGDLVFSFSTSMNEFWNALLEKAYAKLLGCYEALDGLTITDIIVDFTGTLAETVDMQKGRYTELVEEKYKLFGELYKTFTKGGLICCSIESPNQEEQEVETDWGLLKGHTYTMTDIRKIRLGERLVEVFSAEKVYMVRLRNPLGRQEWSGPWSEISEEWQQLTASDRKNLGLVMSDDGEFWMSLEDFCRNFHKLNVCRNVNNPIFGRKELESVLGCWTVDDDPLMNRSGGCYNNRDTFLQNPQYIFTVPEDGHKVIMSLQQKDLRTYRRMGRPDNYIIGFELFKVEMNRKFRLHHLYIQERAGTSTYIDTRTVFLSKYLKKGNYVLVPTMFQHGRTSEFLLRIFSEVPVQLRELTLDMPKMSCWNLARGYPKVVTQITVHSAEDLEKKYANETVNPYLVIKCGKEEVRSPVQKNTVHAIFDTQAIFYRRTTDIPIIVQVWNSRKFCDQFLGQVTLDADPSDCRDLKSLYLRKKGGPTAKVKQGHISFKVISSDDLTEL

SEQ ID NO: 521 - protein, 178 aa, Homo sapiens
MSPSGRLCLLTIVGLILPTRGQTLKDTTSSSSADSTIMDIQVPTRAPDAVYTELQPTSPTPTWPADETPQPQTQTQQLEGTDGPLVTDPETHKSTKAAHPTDDTTTLSERPSPSTDVQTDPQTLKPSGFHEDDPFFYDEHTLRKRGLLVAAVLFITGIIILTSGKCRQLSRLCRNRCR

SEQ ID NO: 522 - protein, 93 aa, Homo sapiens
MNAKVVVVLVLVLTALCLSDGKPVSLSYRCPCRFFESHVARANVKHLKILNTPNCALQIVARLKNNNRQVCIDPKLKWIQEYLEKALNKRFKM

SEQ ID NO: 523 - protein, 119 aa, Homo sapiens
MSRSVALAVLALLSLSGLEAIQRTPKIQVYSRHPAENGKSNFLNCYVSGFHPSDIEVDLLKNGERIEKVEHSDLSFSKDWSFYLLYYTEFTPTEKDEYACRVNHVTLSQPKIVKWDRDM

SEQ ID NO: 524 - protein, 132 aa, Homo sapiens
MKSSGLFPFLVLLALGTLAPWAVEGSGKSFKAGVCPPKKSAQCLRYKKPECQSDWQCPGKKRCCPDTCGIKCLDPVDTPNPTRRKPGKCPVTYGQCLMLNPPNFCEMDGQCKRDLKCCMGMCGKSCVSPVKA

SEQ ID NO: 525 - protein, 181 aa, Homo sapiens
MCKGLAALPHSCLERAKEIKIKLGILLQKPDSVGDLVIPYNEKPEKPAKTQKTSLDEALQWRDSLDKLLQNNYGLASFKSFLKSEFSEENLEFWIACEDYKKIKSPAKMAEKAKQIYEEFIQTEAPKEVNIDHFTKDITMKNLVEPSLSSFDMAQKRIHALMEKDSLPRFVRSEFYQELIK

SEQ ID NO: 526 - protein, 683 aa, Homo sapiens
MALFVRLLALALALALGPAATLAGPAKSPYQLVLQHSRLRGRQHGPNVCAVQKVIGTNRKYFTNCKQWYQRKICGKSTVISYECCPGYEKVPGEKGCPAALPLSNLYETLGVVGSTTTQLYTDRTEKLRPEMEGPGSFTIFAPSNEAWASLPAEVLDSLVSNVNIELLNALRYHMVGRRVLTDELKHGMTLTSMYQNSNIQIHHYPNGIVTVNCARLLKADHHATNGVVHLIDKVISTITNNIQQIIEIEDTFETLRAAVAASGLNTMLEGNGQYTLLAPTNEAFEKIPSETLNRILGDPEALRDLLNNHILKSAMCAEAIVAGLSVETLEGTTLEVGCSGDMLTINGKAIISNKDILATNGVIHYIDELLIPDSAKTLFELAAESDVSTAIDLFRQAGLGNHLSGSERLTLLAPLNSVFKDGTPPIDAHTRNLLRNHIIKDQLASKYLYHGQTLETLGGKKLRVFVYRNSLCIENSCIAAHDKRGRYGTLFTMDRVLTPPMGTVMDVLKGDNRFSMLVAAIQSAGLTETLNREGVYTVFAPTNEAFRALPPRERSRLLGDAKELANILKYHIGDEILVSGGIGALVRLKSLQGDKLEVSLKNNVVSVNKEPVAEPDIMATNGVVHVITNVLQPPANRPQERGDELADSALEIFKQASAFSRASQRSVRLAPVYQKLLERMKH

SEQ ID NO: 527 - protein, 255 aa, Homo sapiens
MILNKALLLGALALTTVMSPCGGEDIVADHVASCGVNLYQFYGPSGQYTHEFDGDEQFYVDLERKETAWRWPEFSKFGGFDPQGALRNMAVAKHNLNIMIKRYNSTAATNEVPEVTVFSKSPVTLGQPNTLICLVDNIFPPVVNITWLSNGQSVTEGVSETSFLSKSDHSFFKISYLTFLPSADEIYDCKVEHWGLDQPLLKHWEPEIPAPMSELTETVVCALGLSVGLMGIVVGTVFIIQGLRSVGASRHQGPL

SEQ ID NO: 528 - protein, 781 aa, Homo sapiens
MATQADLMELDMAMEPDRKAAVSHWQQQSYLDSGIHSGATTTAPSLSGKGNPEEEDVDTSQVLYEWEQGFSQSFTQEQVADIDGQYAMTRAQRVRAAMFPETLDEGMQIPSTQFDAAHPTNVQRLAEPSQMLKHAVVNLINYQDDAELATRAIPELTKLLNDEDQVVVNKAAVMVHQLSKKEASRHAIMRSPQMVSAIVRTMQNTNDVETARCTAGTLHNLSHHREGLLAIFKSGGIPALVKMLGSPVDSVLFYAITTLHNLLLHQEGAKMAVRLAGGLQKMVALLNKTNVKFLAITTDCLQILAYGNQESKLIILASGGPQALVNIMRTYTYEKLLWTTSRVLKVLSVCSSNKPAIVEAGGMQALGLHLTDPSQRLVQNCLWTLRNLSDAATKQEGMEGLLGTLVQLLGSDDINVVTCAAGILSNLTCNNYKNKMMVCQVGGIEALVRTVLRAGDREDITEPAICALRHLTSRHQEAEMAQNAVRLHYGLPVVVKLLHPPSHWPLIKATVGLIRNLALCPANHAPLREQGAIPRLVQLLVRAHQDTQRRTSMGGTQQQFVEGVRMEEIVEGCTGALHILARDVHNRIVIRGLNTIPLFVQLLYSPIENIQRVAAGVLCELAQDKEAAEAIEAEGATAPLTELLHSRNEGVATYAAAVLFRMSEDKPQDYKKRLSVELTSSLFRTEPMAWNETADLGLDIGAQGEPLGYRQDDPSYRSFHSGGYGQDALGMDPMMEHEMGGHHPGADYPVDGLPDLGHAQDLMDGLPPGDSNQLAWFDTDL

SEQ ID NO: 529 - protein, 256 aa, Homo sapiens
MSELPGDVRAFLREHPSLRLQTDARKVRCILTGHELPCRLPELQVYTRGKKYQRLVRASPAFDYAEFEPHIVPSTKNPHQLFCKLTLRHINKCPEHVLRHTQGRRYQRALCKYEECQKQGVEYVPACLVHRRRRREDQMDGDGPRPREAFWEPTSSDEGGAASDDSMTDLYPPELFTRKDLGSTEDGDGTDDFLTDKEDEKAKPPREKATDEGRRETTVYRGLVQKRGKKQLGSLKKKFKSHHRKPKSFSSCKQPG

SEQ ID NO: 530 - protein, 687 aa, Homo sapiens
MAEELVLERCDLELETNGRDHHTADLCREKLVVRRGQPFWLTLHFEGRNYQASVDSLTFSVVTGPAPSQEAGTKARFPLRDAVEEGDWTATVVDQQDCTLSLQLTTPANAPIGLYRLSLEASTGYQGSSFVLGHFILLFNAWCPADAVYLDSEEERQEYVLTQQGFIYQGSAKFIKNIPWNFGQFQDGILDICLILLDVNPKFLKNAGRDCSRRSSPVYVGRVGSGMVNCNDDQGVLLGRWDNNYGDGVSPMSWIGSVDILRRWKNHGCQRVKYGQCWVFAAVACTVLRCLGIPTRVVTNYNSAHDQNSNLLIEYFRNEFGEIQGDKSEMIWNFHCWVESWMTRPDLQPGYEGWQALDPTPQEKSEGTYCCGPVPVRAIKEGDLSTKYDAPFVFAEVNADVVDWIQQDDGSVHKSINRSLIVGLKISTKSVGRDEREDITHTYKYPEGSSEEREAFTRANHLNKLAEKEETGMAMRIRVGQSMNMGSDFDVFAHITNNTAEEYVCRLLLCARTVSYNGILGPECGTKYLLNLTLEPFSEKSVPLCILYEKYRDCLTESNLIKVRALLVEPVINSYLLAERDLYLENPEIKIRILGEPKQKRKLVAEVSLQNPLPVALEGCTFTVEGAGLTEEQKTVEIPDPVEAGEEVKVRMDLVPLHMGLHKLVVNFESDKLKAVKGFRNVIIGPA

SEQ ID NO: 531 - protein, 168 aa, Homo sapiens
MNSKGQYPTQPTYPVQPPGNPVYPQTLHLPQAPPYTDAPPAYSELYRPSFVHPGAATVPTMSAAFPGASLYLPMAQSVAVGPLGSTIPMAYYPVGPIYPPGSTVLVEGGYDAGARFGAGATAGNIPPPPPGCPPNAAQLAVMQGANVLVTQRKGNFFMGGSDGGYTIW

SEQ ID NO: 532 - protein, 836 aa, Homo sapiens
MIPFLPMFSLLLLLIVNPINANNHYDKILAHSRIRGRDQGPNVCALQQILGTKKKYFSTCKNWYKKSICGQKTTVLYECCPGYMRMEGMKGCPAVLPIDHVYGTLGIVGATTTQRYSDASKLREEIEGKGSFTYFAPSNEAWDNLDSDIRRGLESNVNVELLNALHSHMINKRMLTKDLKNGMIIPSMYNNLGLFINHYPNGVVTVNCARIIHGNQIATNGVVHVIDRVLTQIGTSIQDFIEAEDDLSSFRAAAITSDILEALGRDGHFTLFAPTNEAFEKLPRGVLERFMGDKVASEALMKYHILNTLQCSESIMGGAVFETLEGNTIEIGCDGDSITVNGIKMVNKKDIVTNNGVIHLIDQVLIPDSAKQVIELAGKQQTTFTDLVAQLGLASALRPDGEYTLLAPVNNAFSDDTLSMVQRLLKLILQNHILKVKVGLNELYNGQILETIGGKQLRVFVYRTAVCIENSCMEKGSKQGRNGAIHIFREIIKPAEKSLHEKLKQDKRFSTFLSLLEAADLKELLTQPGDWTLFVPTNDAFKGMTSEEKEILIRDKNALQNIILYHLTPGVFIGKGFEPGVTNILKTTQGSKIFLKEVNDTLLVNELKSKESDIMTTNGVIHVVDKLLYPADTPVGNDQLLEILNKLIKYIQIKFVRGSTFKEIPVTVYTTKIITKVVEPKIKVIEGSLQPIIKTEGPTLTKVKIEGEPEFRLIKEGETITEVIHGEPIIKKYTKIIDGVPVEITEKETREERIITGPEIKYTRISTGGGETEETLKKLLQEEVTKVTKFIEGGDGHLFEDEEIKRLLQGDTPVRKLQANKKVQGSRRRLREGRSQ

SEQ ID NO: 533 - protein, 416 aa, Homo sapiens
MAPRSARRPLLLLLPVAAARPHALSSAAMFMVKNGNGTACIMANFSAAFSVNYDTKSGPKNMTFDLPSDATVVLNRSSCGKENTSDPSLVIAFGRGHTLTLNFTRNATRYSVQLMSFVYNLSDTHLFPNASSKEIKTVESITDIRADIDKKYRCVSGTQVHMNNVTVTLHDATIQAYLSNSSFSRGETRCEQDRPSPTTAPPAPPSPSPSPVPKSPSVDKYNVSGTNGTCLLASMGLQLNLTYERKDNTTVTRLLNINPNKTSASGSCGAHLVTLELHSEGTTVLLFQFGMNASSSRFFLQGIQLNTILPDARDPAFKAANGSLRALQATVGNSYKCNAEEHVRVTKAFSVNIFKVWVQAFKVEGGQFGSVEECLLDENSTLIPIAVGGALAGLVLIVLIAYLVGRKRSHAGYQTI

SEQ ID NO: 534 - protein, 169 aa, Homo sapiens
MAPPWVPAMGFTLAPSLGCFVGSRFVHGEGLRWYAGLQKPSWHPPHWVLGPVWGTLYSAMGYGSYLVWKELGGFTEKAVVPLGLYTGQLALNWAWPPIFFGARQMGWALVDLLLVSGAAAATTVAWYQVSPLAARLLYPYLAWLAFATTLNYCVWRDNHGWHGGRRLPE

SEQ ID NO: 535 - protein, 563 aa, Homo sapiens
MGLQACLLGLFALILSGKCSYSPEPDQRRTLPPGWVSLGRADPEEELSLTFALRQQNVERLSELVQAVSDPSSPQYGKYLTLENVADLVRPSPLTLHTVQKWLLAAGAQKCHSVITQDFLTCWLSIRQAELLLPGAEFHHYVGGPTETHVVRSPHPYQLPQALAPHVDFVGGLHRFPPTSSLRQRPEPQVTGTVGLHLGVTPSVIRKRYNLTSQDVGSGTSNNSQACAQFLEQYFHDSDLAQFMRLFGGNFAHQASVARVVGQQGRGRAGIEASLDVQYLMSAGANISTWVYSSPGRHEGQEPFLQWLMLLSNESALPHVHTVSYGDDEDSLSSAYIQRVNTELMKAAARGLTLLFASGDSGAGCWSVSGRHQFRPTFPASSPYVTTVGGTSFQEPFLITNEIVDYISGGGFSNVFPRPSYQEEAVTKFLSSSPHLPPSSYFNASGRAYPDVAALSDGYWVVSNRVPIPWVSGTSASTPVFGGILSLINEHRILSGRPPLGFLNPRLYQQHGAGLFDVTRGCHESCLDEEVEGQGFCSGPGWDPVTGWGTPNFPALLKTLLNP

SEQ ID NO: 536 - protein, 1104 aa, Homo sapiens
MERSPGEGPSPSPMDQPSAPSDPTDQPPAAHAKPDPGSGGQPAGPGAAGEALAVLTSFGRRLLVLIPVYLAGAVGLSVGFVLFGLALYLGWRRVRDEKERSLRAARQLLDDEEQLTAKTLYMSHRELPAWVSFPDVEKAEWLNKIVAQVWPFLGQYMEKLLAETVAPAVRGSNPHLQTFTFTRVELGEKPLRIIGVKVHPGQRKEQILLDLNISYVGDVQIDVEVKKYFCKAGVKGMQLHGVLRVILEPLIGDLPFVGAVSMFFIRRPTLDINWTGMTNLLDIPGLSSLSDTMIMDSIAAFLVLPNRLLVPLVPDLQDVAQLRSPLPRGIIRIHLLAARGLSSKDKYVKGLIEGKSDPYALVRLGTQTFCSRVIDEELNPQWGETYEVMVHEVPGQEIEVEVFDKDPDKDDFLGRMKLDVGKVLQASVLDDWFPLQGGQGQVHLRLEWLSLLSDAEKLEQVLQWNWGVSSRPDPPSAAILVVYLDRAQDLPLKKGNKEPNPMVQLSIQDVTQESKAVYSTNCPVWEEAFRFFLQDPQSQELDVQVKDDSRALTLGALTLPLARLLTAPELILDQWFQLSSSGPNSRLYMKLVMRILYLDSSEICFPTVPGCPGAWDVDSENPQRGSSVDAPPRPCHTTPDSQFGTEHVLRIHVLEAQDLIAKDRFLGGLVKGKSDPYVKLKLAGRSFRSHVVREDLNPRWNEVFEVIVTSVPGQELEVEVFDKDLDKDDFLGRCKVRLTTVLNSGFLDEWLTLEDVPSGRLHLRLERLTPRPTAAELEEVLQVNSLIQTQKSAELAAALLSIYMERAEDLPLRKGTKHLSPYATLTVGDSSHKTKTISQTSAPVWDESASFLIRKPHTESLELQVRGEGTGVLGSLSLPLSELLVADQLCLDRWFTLSSGQGQVLLRAQLGILVSQHSGVEAHSHSYSHSSSSLSEEPELSGGPPHITSSAPELRQRLTHVDSPLEAPAGPLGQVKLTLWYYSEERKLVSIVHGCRSLRQNGRDPPDPYVSLLLLPDKNRGTKRRTSQKKRTLSPEFNERFEWELPLDEAQRRKLDVSVKSNSSFMSRERELLGKVQLDLAETDLSQGVARWYDLMDNKDKGSS

SEQ ID NO: 537 - protein, 289 aa, Homo sapiens
MENGYTYEDYKNTAEWLLSHTKHRPQVAIICGSGLGGLTDKLTQAQIFDYSEIPNFPRSTVPGHAGRLVFGFLNGRACVMMQGRFHMYEGYPLWKVTFPVRVFHLLGVDTLVVTNAAGGLNPKFEVGDIMLIRDHINLPGFSGQNPLRGPNDERFGDRFPAMSDAYDRTMRQRALSTWKQMGEQRELQEGTYVMVAGPSFETVAECRVLQKLGADAVGMSTVPEVIVARHCGLRVFGFSLITNKVIMDYESLEKANHEEVLAAGKQAAQKLEQFVSILMASIPLPDKAS

SEQ ID NO: 538 - protein, 426 aa, Homo sapiens
MCDRNGGRRLRQWLIEQIDSSMYPGLIWENEEKSMFRIPWKHAGKQDYNQEVDASIFKAWAVFKGKFKEGDKAEPATWKTRLRCALNKSPDFEEVTDRSQLDISEPYKVYRIVPEEEQKCKLGVATAGCVNEVTEMECGRSEIDELIKEPSVDDYMGMIKRSPSPPEACRSQLLPDWWAQQPSTGVPLVTGYTTYDAHHSAFSQMVISFYYGGKLVGQATTTCPEGCRLSLSQPGLPGTKLYGPEGLELVRFPPADAIPSERQRQVTRKLFGHLERGVLLHSSRQGVFVKRLCQGRVFCSGNAVVCKGRPNKLERDEVVQVFDTSQFFRELQQFYNSQGRLPDGRVVLCFGEEFPDMAPLRSKLILVQIEQLYVRQLAEEAGKSCGAGSVMQAPEEPPPDQVFRMFPDICASHQRSFFRENQQITV

SEQ ID NO: 539 - protein, 533 aa, Homo sapiens
MWLGRRALCALVLLLACASLGLLYASTRDAPGLRLPLAPWAPPQSPRRPELPDLAPEPRYAHIPVRIKEQVVGLLAWNNCSCESSGGGLPLPFQKQVRAIDLTKAFDPAELRAASATREQEFQAFLSRSQSPADQLLIAPANSPLQYPLQGVEVQPLRSILVPGLSLQAASGQEVYQVNLTASLGTWDVAGEVTGVTLTGEGQADLTLVSPGLDQLNRQLQLVTYSSRSYQTNTADTVRFSTEGHEAAFTIRIRHPPNPRLYPPGSLPQGAQYNISALVTIATKTFLRYDRLRALITSIRRFYPTVTVVIADDSDKPERVSGPYVEHYLMPFGKGWFAGRNLAVSQVTTKYVLWVDDDFVFTARTRLERLVDVLERTPLDLVGGAVREISGFATTYRQLLSVEPGAPGLGNCLRQRRGFHHELVGFPGCVVTDGVVNFFLARTDKVREVGFDPRLSRVAHLEFFLDGLGSLRVGSCSDVVVDHASKLKLPWTSRDAGAETYARYRYPGSLDESQMAKHRLLFFKHRLQCMTSQ

SEQ ID NO: 540 - protein, 153 aa, Homo sapiens
MGAPLLSPGWGAGAAGRRWWMLLAPLLPALLLVRPAGALVEGLYCGTRDCYEVLGVSRSAGKAEIARAYRQLARRYHPDRYRPQPGDEGPGRTPQSAEEAFLLVATAYETLKVSQAAAELQQYCMQNACKDALLVGVPAGSNPFREPRSCALL

SEQ ID NO: 541 - protein, 874 aa, Homo sapiens
MLKKFDKKDEESGGGSNPFQHLEKSAVLQEARVFNETPINPRKCAHILTKILYLINQGEHLGTTEATEAFFAMTKLFQSNDPTLRRMCYLTIKEMSCIAEDVIIVTSSLTKDMTGKEDNYRGPAVRALCQITDSTMLQAIERYMKQAIVDKVPSVSSSALVSSLHLLKCSFDVVKRWVNEAQEAASSDNIMVQYHALGLLYHVRKNDRLAVNKMISKVTRHGLKSPFAYCMMIRVASKQLEEEDGSRDSPLFDFIESCLRNKHEMVVYEAASAIVNLPGCSAKELAPAVSVLQLFCSSPKAALRYAAVRTLNKVAMKHPSAVTACNLDLENLVTDSNRSIATLAITTLLKTGSESSIDRLMKQISSFMSEISDEFKVVVVQAISALCQKYPRKHAVLMNFLFTMLREEGGFEYKRAIVDCIISIIEENSESKETGLSHLCEFIEDCEFTVLATRILHLLGQEGPKTTNPSKYIRFIYNRVVLEHEEVRAGAVSALAKFGAQNEEMLPSILVLLKRCVMDDDNEVRDRATFYLNVLEQKQKALNAGYILNGLTVSIPGLERALQQYTLEPSEKPFDLKSVPLATAPMAEQRTESTPITAVKQPEKVAATRQEIFQEQLAAVPEFRGLGPLFKSSPEPVALTESETEYVIRCTKHTFTNHMVFQFDCTNTLNDQTLENVTVQMEPTEAYEVLCYVPARSLPYNQPGTCYTLVALPKEDPTAVACTFSCMMKFTVKDCDPTTGETDDEGYEDEYVLEDLEVTVADHIQKVMKLNFEAAWDEVGDEFEKEETFTLSTIKTLEEAVGNIVKFLGMHPCERSDKVPDNKNTHTLLLAGVFRGGHDILVRSRLLLLDTVTMQVTARSLEELPVDIILASVG

SEQ ID NO: 542 - protein, 261 aa, Homo sapiens
MGHEQNQGAALLQMLPLLWLLPHSWAVPEAPTPMWPDDLQNHTFLHTVYCQDGSPSVGLSEAYDEDQLFFFDFSQNTRVPRLPEFADWAQEQGDAPAILFDKEFCEWMIQQIGPKLDGKIPVSRGFPIAEVFTLKPLEFGKPNTLVCFVSNLFPPMLTVNWQHHSVPVEGFGPTFVSAVDGLSFQAFSYLNFTPEPSDIFSCIVTHEIDRYTAIAYWVPRNALPSDLLENVLCGVAFGLGVLGIIVGIVLIIYFRKPCSGD

SEQ ID NO: 543 - protein, 272 aa, Homo sapiens
MKGKKGIVAASGSETEDEDSMDIPLDLSSSAGSGKRRRRGNLPKESVQILRDWLYEHRYNAYPSEQEKALLSQQTHLSTLQVCNWFINARRRLLPDMLRKDGKDPNQFTISRRGAKISETSSVESVMGIKNFMPALEETPFHSCTAGPNPTLGRPLSPKPSSPGSVLARPSVICHTTVTALKDVPFSLCQSVGVGQNTDIQQIAAKNFTDTSLMYPEDTCKSGPSTNTQSGLFNTPPPTPPDLNQDFSGFQLLVDVALKRAAEMELQAKLTA

SEQ ID NO: 544 - protein, 1129 aa, Homo sapiens
MPATRKPMRYGHTEGHTEVCFDDSGSFIVTCGSDGDVRIWEDLDDDDPKFINVGEKAYSCALKSGKLVTAVSNNTIQVHTFPEGVPDGILTRFTTNANHVVFNGDGTKIAAGSSDFLVKIVDVMDSSQQKTFRGHDAPVLSLSFDPKDIFLASASCDGSVRVWQISDQTCAISWPLLQKCNDVINAKSICRLAWQPKSGKLLAIPVEKSVKLYRRESWSHQFDLSDNFISQTLNIVTWSPCGQYLAAGSINGLIIVWNVETKDCMERVKHEKGYAICGLAWHPTCGRISYTDAEGNLGLLENVCDPSGKTSSSKVSSRVEKDYNDLFDGDDMSNAGDFLNDNAVEIPSFSKGIINDDEDDEDLMMASGRPRQRSHILEDDENSVDISMLKTGSSLLKEEEEDGQEGSIHNLPLVTSQRPFYDGPMPTPRQKPFQSGSTPLHLTHRFMVWNSIGIIRCYNDEQDNAIDVEFHDTSIHHATHLSNTLNYTIADLSHEAILLACESTDELASKLHCLHFSSWDSSKEWIIDLPQNEDIEAICLGQGWAAAATSALLLRLFTIGGVQKEVFSLAGPVVSMAGHGEQLFIVYHRGTGFDGDQCLGVQLLELGKKKKQILHGDPLPLTRKSYLAWIGFSAEGTPCYVDSEGIVRMLNRGLGNTWTPICNTREHCKGKSDHYWVVGIHENPQQLRCIPCKGSRFPPTLPRPAVAILSFKLPYCQIATEKGQMEEQFWRSVIFHNHLDYLAKNGYEYEESTKNQATKEQQELLMKMLALSCKLEREFRCVELADLMTQNAVNLAIKYASRSRKLILAQKLSELAVEKAAELTATQVEEEEEEEDFRKKLNAGYSNTATEWSQPRFRNQVEEDAEDSGEADDEEKPEIHKPGQNSFSKSTNSSDVSAKSGAVTFSSQGRVNPFKVSASSKEPAMSMNSARSTNILDNMGKSSKKSTALSRTTNNEKSPIIKPLIPKPKPKQASAASYFQKRNSQTNKTEEVKEENLKNVLSETPAICPPQNTENQRPKTGFQMWLEENRSNILSDNPDFSDEADIIKEGMIRFRVLSTEERKVWANKAKGETASEGTEAKKRKRVVDESDETENQEEKAKENLNLSKKQKPLDFSTNQKLSAFAFKQE

SEQ ID NO: 545 - protein, 742 aa, Homo sapiens
MDKFWWHAAWGLCLVPLSLAQIDLNITCRFAGVFHVEKNGRYSISRTEAADLCKAFNSTLPTMAQMEKALSIGFETCRYGFIEGHVVIPRIHPNSICAANNTGVYILTYNTSQYDTYCFNASAPPEEDCTSVTDLPNAFDGPITITIVNRDGTRYVQKGEYRTNPEDIYPSNPTDDDVSSGSSSERSSTSGGYIFYTFSTVHPIPDEDSPWITDSTDRIPATTLMSTSATATETATKRQEAWDWFSWLFLPSESKNHLHTTTQMAGTSSNTISAGWEPNEENEDERDRHLSFSGSGIDDDEDFISSTISTTPRAFDHTKQNQDWTQWNPSHSNPEVLLQTTTRMTDVDRNGTTAYEGNWNPEAHPPLIHHEHHEEEETPHSTSTIQATPSSTTEETATQKEQWFGNRWHEGYRQTPREDSHSTTGTAAASAHTSHPMQGRTTPSPEDSSWTDFFNPISHPMGRGHQAGRRMDMDSSHSTTLQPTANPNTGLVENLDRTGPLSMTTQQSNSQSFSTSHEGLEEDKDHPTTSTLTSSNRNDVTGGRRDPNHSEGSTTLLEGYTSHYPHTKESRTFIPVTSAKTGSFGVTAVTVGDSNSNVNRSLSGDQDTFHPSGGSHTTHGSESDGHSHGSQEGGANTTSGPIRTPQIPEWLIILASLLALALILAVCIAVNSRRRCGQKKKLVINSGNGAVEDRKPSGLNGEASKSQEMVHLVNKESSETPDQFMTADETRNLQNVDMKIGV

SEQ ID NO: 546 - protein, 671 aa, Homo sapiens
MQPDMSLNVIKMKSSDFLESAELDSGGFGKVSLCFHRTQGLMIMKTVYKGPNCIEHNEALLEEAKMMNRLRHSRVVKLLGVIIEEGKYSLVMEYMEKGNLMHVLKAEMSTPLSVKGRIILEIIEGMCYLHGKGVIHKDLKPENILVDNDFHIKIADLGLASFKMWSKLNNEEHNELREVDGTAKKNGGTLYYMAPEHLNDVNAKPTEKSDVYSFAVVLWAIFANKEPYENAICEQQLIMCIKSGNRPDVDDITEYCPREIISLMKLCWEANPEARPTFPGIEEKFRPFYLSQLEESVEEDVKSLKKEYSNENAVVKRMQSLQLDCVAVPSSRSNSATEQPGSLHSSQGLGMGPVEESWFAPSLEHPQEENEPSLQSKLQDEANYHLYGSRMDRQTKQQPRQNVAYNREEERRRRVSHDPFAQQRPYENFQNTEGKGTVYSSAASHGNAVHQPSGLTSQPQVLYQNNGLYSSHGFGTRPLDPGTAGPRVWYRPIPSHMPSLHNIPVPETNYLGNTPTMPFSSLPPTDESIKYTIYNSTGIQIGAYNYMEIGGTSSSLLDSTNTNFKEEPAAKYQAIFDNTTSLTDKHLDPIRENLGKHWKNCARKLGFTQSQIDEIDHDYERDGLKEKVYQMLQKWVMREGIKGATVGKLAQALHQCSRIDLLSSLIYVSQN

SEQ ID NO: 547 - protein, 155 aa, Homo sapiens
MSESKSGPEYASFFAVMGASAAMVFSALGAAYGTAKSGTGIAAMSVMRPEQIMKSIIPVVMAGIIAIYGLVVAVLIANSLNDDISLYKSFLQLGAGLSVGLSGLAAGFAIGIVGDAGVRGTAQQPRLFVGMILILIFAEVLGLYGLIVALILSTK

SEQ ID NO: 548 - protein, 411 aa, Homo sapiens
MATTATMATSGSARKRLLKEEDMTKVEFETSEEVDVTPTFDTMGLREDLLRGIYAYGFEKPSAIQQRAIKQIIKGRDVIAQSQSGTGKTATFSISVLQCLDIQVRETQALILAPTRELAVQIQKGLLALGDYMNVQCHACIGGTNVGEDIRKLDYGQHVVAGTPGRVFDMIRRRSLRTRAIKMLVLDEADEMLNKGFKEQIYDVYRYLPPATQVVLISATLPHEILEMTNKFMTDPIRILVKRDELTLEGIKQFFVAVEREEWKFDTLCDLYDTLTITQAVIFCNTKRKVDWLTEKMREANFTVSSMHGDMPQKERESIMKEFRSGASRVLISTDVWARGLDVPQVSLIINYDLPNNRELYIHRIGRSGRYGRKGVAINFVKNDDIRILRDIEQYYSTQIDEMPMNVADLI

SEQ ID NO: 549 - protein, 885 aa, Homo sapiens
MVLSGCAIIVRGQPRGGPPPERQINLSNIRAGNLARRAAATQPDAKDTPDEPWAFPAREFLRKKLIGKEVCFTIENKTPQGREYGMIYLGKDTNGENIAESLVAEGLATRREGMRANNPEQNRLSECEEQAKAAKKGMWSEGNGSHTIRDLKYTIENPRHFVDSHHQKPVNAIIEHVRDGSVVRALLLPDYYLVTVMLSGIKCPTFRREADGSETPEPFAAEAKFFTESRLLQRDVQIILESCHNQNIVGTILHPNGNITELLLKEGFARCVDWSIAVYTRGAEKLRAAERFAKERRLRIWRDYVAPTANLDQKDKQFVAKVMQVLNADAIVVKLNSGDYKTIHLSSIRPPRLEGENTQDKNKKLRPLYDIPYMFEAREFLRKKLIGKKVNVTVDYIRPASPATETVPAFSERTCATVTIGGINIAEALVSKGLATVIRYRQDDDQRSSHYDELLAAEARAIKNGKGLHSKKEVPIHRVADISGDTQKAKQFLPFLQRAGRSEAVVEYVFSGSRLKLYLPKETCLITFLLAGIECPRGARNLPGLVQEGEPFSEEATLFTKELVLQREVEVEVESMDKAGNFIGWLHIDGANLSVLLVEHALSKVHFTAERSSYYKSLLSAEEAAKQKKEKVWAHYEEQPVEEVMPVLEEKERSASYKPVFVTEITDDLHFYVQDVETGTQFQKLMENMRNDIASHPPVEGSYAPRRGEFCIAKFVDGEWYRARVEKVESPAKIHVFYIDYGNREVLPSTRLGTLSPAFSTRVLPAQATEYAFAFIQVPQDDDARTDAVDSVVRDIQNTQCLLNVEHLSAGCPHVTLQFADSKGDVGLGLVKEGLVMVEVRKEKQFQKVITEYLNAQESAKSARLNLWRYGDFRADDADEFGYSR

SEQ ID NO: 550 - protein, 491 aa, Homo sapiens; identical to SEQ ID NO: 473

SEQ ID NO: 551 - protein, 586 aa, Homo sapiens [sequence omitted]

SEQ ID NO: 552 - protein, 68 aa, Homo sapiens
MPKHEFSVDMTCGGCAEAVSRVLNKLGGVKYDIDLPNKKVCIESEHSMDTLLATLKKTGKTVSYLGLE

SEQ ID NO: 553 - protein, 1194 aa, Homo sapiens
MDAKARNCLLQHREALEKDIKTSYIMDHMISDGFLTISEEEKVRNEPTQQQRAAMLIKMILKKDNDSYVSFYNALLHEGYKDLAALLHDGIPVVSSSSVRTVLCEGGVPQRPVVFVTRKKLVNAIQQKLSKLKGEPGWVTIHGMAGCGKSVLAAEAVRDHSLLEGCFPGGVHWVSVGKQDKSGLLMKLQNLCTRLDQDESFSQRLPLNIEEAKDRLRILMLRKHPRSLLILDDVWDSWVLKAFDSQCQILLTTRDKSVTDSVMGPKYVVPVESSLGKEKGLEILSLFVNMKKADLPEQAHSIIKECKGSPLVVSLIGALLRDFPNRWEYYLKQLQNKQFKRIRKSSSYDYEALDEAMSISVEMLREDIKDYYTDLSILQKDVKVPTKVLCILWDMETEEVEDILQEFVNKSLLFCDRNGKSFRYYLHDLQVDFLTEKNCSQLQDLHKKIITQFQRYHQPHTLSPDQEDCMYWYNFLAYHMASAKMHKELCALMFSLDWIKAKTELVGPAHLIHEFVEYRHILDEKDCAVSENFQEFLSLNGHLLGRQPFPNIVQLGLCEPETSEVYQQAKLQAKQEVDNGMLYLEWINKKNITNLSRLVVRPHTDAVYHACFSEDGQRIASCGADKTLQVFKAETGEKLLEIKAHEDEVLCCAFSTDDRFIATCSVDKKVKIWNSMTGELVHTYDEHSEQVNCCHFTNSSHHLLLATGSSDCFLKLWDLNQKECRNTMFGHTNSVNHCRFSPDDKLLASCSADGTLKLWDATSANERKSINVKQFFLNLEDPQEDMEVIVKCCSWSADGARIMVAAKNKIFLWNTDSRSKVADCRGHLSWVHGVMFSPDGSSFLTSSDDQTIRLWETKKVCKNSAVMLKQEVDVVFQENEVMVLAVDHIRRLQLINGRTGQIDYLTEAQVSCCCLSPHLQYIAFGDENGAIEILELVNNRIFQSRFQHKKTVWHIQFTADEKTLISSSDDAEIQVWNWQLDKCIFLRGHQETVKDFRLLKNSRLLSWSFDGTVKVWNIITGNKEKDFVCHQGTVLSCDISHDATKFSSTSADKTAKIWSFDLLLPLHELRGHNGCVRCSAFSVDSTLLATGDDNGEIRIWNVSNGELLHLCAPLSEEGAATHGGWVTDLCFSPDGKMLISAGGYIKWWNVVTGESSQTFYTNGTNLKKIHVSPDFKTYVTVDNLGILYILQTLE

SEQ ID NO: 554 - protein, 559 aa, Homo sapiens
MRKFAYCKVVLATSLIWVLLDMFLLLYFSECNKCDEKKERGLPAGDVLEPVQKPHEGPGEMGKPVVIPKEDQEKMKEMFKINQFNLMASEMIALNRSLPDVRLEGCKTKVYPDNLPTTSVVIVFHNEAWSTLLRTVHSVINRSPRHMIEEIVLVDDASERDFLKRPLESYVKKLKVPVHVIRMEQRSGLIRARLKGAAVSKGQVITFLDAHCECTVGWLEPLLARIKHDRRTVVCPIIDVISDDTFEYMAGSDMTYGGFNWKLNFRWYPVPQREMDRRKGDRTLPVRTPTMAGGLFSIDRDYFQEIGTYDAGMDIWGGENLEISFRIWQCGGTLEIVTCSHVGHVFRKATPYTFPGGTGQIINKNNRRLAEVWMDEFKNFFYIISPGVTKVDYGDISSRVGLRHKLQCKPFSWYLENIYPDSQIPRHYFSLGEIRNVETNQCLDNMARKENEKVGIFNCHGMGGNQVFSYTANKEIRTDDLCLDVSKLNGPVTMLKCHHLKGNQLWEYDPVKLTLQHVNSNQCLDKATEEDSQVPSIRDCNGSRSQQWLLRNVTLPEIF

SEQ ID NO: 555 - protein, 729 aa, Homo sapiens
MTEITAEGNASTTTTVIDSKNGSVPKSPGKVLKRTVTEDIVTTFSSPAAWLLVIALIITWSAVAIVMFDLVDYKNFSASSIAKIGSDPLKLVRDAMEETTDWIYGFFSLLSDIISSEDEEDDDGDEDTDKGEIDEPPLRKKEIHKDKTEKQEKPERKIQTKVTHKEKEKGKEKVREKEKPEKKATHKEKIEKKEKPETKTVAKEQKKAKTAEKSEEKTKKEVKGGKQEKVKQTAAKVKEVQKTPSKPKEKEDKEKAAVSKHEQKDQYAFCRYMIDIFVHGDLKPGQSPAIPPPLPTEQASRPTPASPALEEKEGEKKKAEKKVTSETKKKEKEDIKKKSEKETAIDVEKKEPGKASETKQGTVKIAAQAAAKKDEKKEDSKKTKKPAEVEQPKGKKQEKKEKHVEPAKSPKKEHSVPSDKQVKAKTERAKEEIGAVSSKKAVPGKKEEKTTKTVEQEIRKEKSGKTSSILKDKEPIKGKEEKVPASLKEKEPETKKDEKMSKAGKEVKPKPPQLQGKKEEKPEPQIKKEAKPAISEKVQIHKQDIVKPEKTVSHGKPEEKVLKQVKAVTIEKTAKPKPTKKAEHREREPPSIKTDKPKPTPKGTSEVTESGKKKTEISEKESKEKADMKHLREEKVSTRKESLQLHNVTKAEKPARVSKDVEDVPASKKAKEGTEDVSPTKQKSPISFFQCVYLDGYNGYGFQFPFTPADRPGESSGQANSPGQKQQGQ

SEQ ID NO: 556 - protein, 482 aa, Homo sapiens
MANTGPITNYYTVSKTIGRGTWGEVKLVIDNGTGARRAAKKIPKCYVEDADRFRQEIEIMKSLDHPNIVRLYETFEDMTDFYLVMEYCTGGELFDRLVHQGVFTEALACRIMRQILAAVAYCHAHRVAHRDLKPENFLFLHDNPESPIKLIDFGLAARFKPGQPMRTRAGTPYYVSPQVLEGRYGPECDVWSAGVMMYILLCGYPPFNAPSDRAIMNKVRAGHYTFPDSEWSRVSLQAKDLISRLLDRHPRTRISAEQALRHAWFAMHAPGDHFEPLGLDILSKFRRFQGLSRLKKLALTVIAQHLEDSEIEGLKNLFTQLDTEGDGVLTVEEIRKGIERSGVHLPPDMVLEDVLREVDTAGTGSIDYTEFIAACLHQSHYIREEACRAAFRVLDINGDGLVSAQELRQVFHMAGDLETDAAAELLEADADGDGHITFDEFCGLMRKVPSLALVTEHTVSMMRRTCSRTNISEASLTPRATG

SEQ ID NO: 557 - protein, 642 aa, Homo sapiens
MKRSSVSSGGAGRLSMQELRSQDVNKQGLYTPQTKEKPTFGKLSINKPTSERKVSLFGKRTSGHGSRNSQLGIFSSSEKIKDPRPLNDKAFIQQCIRQLCEFLTENGYAHNVSMKSLQAPSVKDFLKIFTFLYGFLCPSYELPDTKFEEEVPRIFKDLGYPFALSKSSMYTVGAPHTWPHIVAALVWLIDCIKIHTAMKESSPLFDDGQPWGEETEDGIMHNKLFLDYTIKCYESFMSGADSFDEMNAELQSKLKDLFNVDAFKLESLEAKNRALNEQIARLEQEREKEPNRLESLRKLKASLQGDVQKYQAYMSNLESHSAILDQKLNGLNEEIARVELECETIKQENTRLQNIIDNQKYSVADIERINHERNELQQTINKLTKDLEAEQQKLWNEELKYARGKEAIETQLAEYHKLARKLKLIPKGAENSKGYDFEIKFNPEAGANCLVKYRAQVYVPLKELLNETEEEINKALNKKMGLEDTLEQLNAMITESKRSVRTLKEEVQKLDDLYQQKIKEAEEEDEKCASELESLEKHKHLLESTVNQGLSEAMNELDAVQREYQLVVQTTTEERRKVGNNLQRLLEMVATHVGSVEKHLEEQIAKVDREYEECMSEDLSENIKEIRDKYEKKATLIKSSEE

SEQ ID NO: 558 - protein, 663 aa, Homo sapiens
MIEKMQGSRMDEQRCSFPPPLKTEEDYIPYPSVHEVLGREGPFPLILLPQFGGYWIEGTNHEITSIPETEPLQSPTTKVKLECNPTARIYRKHFLGKEHFNYYSLDTALGHLVFSLKYDVIGDQEHLRLLLRTKCRTYHDVIPISCLTEFPNVVQMAKLVCEDVNVDRFYPVLYPKASRLIVTFDEHVISNNFKFGVIYQKLGQTSEEELFSTNEESPAFVEFLEFLGQKVKLQDFKGFRGGLDVTHGQTGTESVYCNFRNKEIMFHVSTKLPYTEGDAQQLQRKRHIGNDIVAVVFQDENTPFVPDMIASNFLHAYVVVQAEGGGPDGPLYKVSVTARDDVPFFGPPLPDPAVFRKGPEFQEFLLTKLINAEYACYKAEKFAKLEERTRAALLETLYEELHIHSQSMMGLGGDEDKMENGSGGGGFFESFKRVIRSRSQSMDAMGLSNKKPNTVSTSHSGSFAPNNPDLAKAAGISLIVPGKSPTRKKSGPFGSRRSSAIGIENIQEVQEKRESPPAGQKTPDSGHVSQEPKSENSSTQSSPEMPTTKNRAETAAQRAEALKDFSRSSSSASSFASVVEETEGVDGEDTGLESVSSSGTPHKRDSFIYSTWLEDSVSTTSGGSSPGPSRSPHPDAGKLGDPACPEIKIQLEASEQHMPQLGC

SEQ ID NO: 559 - protein, 422 aa, Homo sapiens
MVSESHHEALAAPPVTTVATVLPSNATEPASPGEGKEDAFSKLKEKFMNELHKIPLPPWALIAIAIVAVLLVLTCCFCICKKCLFKKKNKKKGKEKGGKNAINMKDVKDLGKTMKDQALKDDDAETGLTDGEEKEEPKEEEKLGKLQYSLDYDFQNNQLLVGIIQAAELPALDMGGTSDPYVKVFLLPDKKKKFETKVHRKTLNPVFNEQFTFKVPYSELGGKTLVMAVYDFDRFSKHDIIGEFKVPMNTVDFGHVTEEWRDLQSAEKEEQEKLGDICFSLRYVPTAGKLTVVILEAKNLKKMDVGGLSDPYVKIHLMQNGKRLKKKKTTIKKNTLNPYYNESFSFEVPFEQIQKVQVVVTVLDYDKIGKNDAIGKVFVGYNSTGAELRHWSDMLANPRRPIAQWHTLQVEEEVDAMLAVKK

SEQ ID NO: 560 - protein, 361 aa, Homo sapiens [sequence omitted]

SEQ ID NO: 561 - protein, 278 aa, Homo sapiens
MAEARSQPSAGPQLNALPDHSPLLQPGLAALRRRAREAGVPLAPLPLTDSFLLRFLRARDFDLDLAWRLLKNYYKWRAECPEISADLHPRSIIGLLKAGYHGVLRSRDPTGSKVLIYRIAHWDPKVFTAYDVFRVSLITSELIVQEVETQRNGIKAIFDLEGWQFSHAFQITPSVAKKIAAVLTDSFPLKVRGIHLINEPVIFHAVFSMIKPFLTEKIKERIHMHGNNYKQSLLQHFPDILPLEYGGEEFSMEDICQEWTNFIMKSEDYLSSISESIQ

SEQ ID NO: 562 - protein, 589 aa, Homo sapiens
MSVSVHENRKSRASSGSINIYLFHKSSYADSVLTHLNLLRQQRLFTDVLLHAGNRTFPCHRAVLAACSRYFEAMFSGGLKESQDSEVNFDNSIHPEVLELLLDYAYSSRVIINEENAESLLEAGDMLEFQDIRDACAEFLEKNLHPTNCLGMLLLSDAHQCTKLYELSWRMCLSNFQTIRKNEDFLQLPQDMVVQLLSSEELETEDERLVYESAINWISYDLKKRYCYLPELLQTVRLALLPAIYLMENVAMEELITKQRKSKEIVEEAIRCKLKILQNDGVVTSLCARPRKTGHALFLLGGQTFMCDKLYLVDQKAKEIIPKADIPSPRKEFSACAIGCKVYITGGRGSENGVSKDVWVYDTLHEEWSKAAPMLVARFGHGSAELKHCLYVVGGHTAATGCLPASPSVSLKQVEHYDPTINKWTMVAPLREGVSNAAVVSAKLKLFAFGGTSVSHDKLPKVQCYDQCENRWTVPATCPQPWRYTAAAVLGNQIFIMGGDTEFSACSAYKFNSETYQWTKVGDVTAKRMSCHAVASGNKLYVVGGYFGIQRCKTLDCYDPTLDVWNSITTVPYSLIPTAFVSTWKHLPS

SEQ ID NO: 563 - protein, 692 aa, Homo sapiens
MESQGVPPGPYRATKLWNEVTTSFRAGMPLRKHRQHFKKYGNCFTAGEAVDWLYDLLRNNSNFGPEVTRQQTIQLLRKFLKNHVIEDIKGRWGSENVDDNNQLFRFPATSPLKTLPRRYPELRKNNIENFSKDKDSIFKLRNLSRRTPKRHGLHLSQENGEKIKHEIINEDQENAIDNRELSQEDVEEVWRYVILIYLQTILGVPSLEEVINPKQVIPQYIMYNMANTSKRGVVILQNKSDDLPHWVLSAMKCLANWPRSNDMNDPTYVGFERDVFRTIADYFLDLPEPLLTFEYYELFVNILVVCGYITVSDRSSGIHKIQDDPQSSKFLHLNNLNSFKSTECLLLSLLHREKNKEESDSTERLQISNPGFQERCAKKMQLVNLRNRRVSANDIMGGSCHNLIGLSNMHDLSSNSKPRCCSLEGIVDVPGNSSKEASSVFHQSFPNIEGQNNKLFLESKPKQEFLLNLHSEENIQKPFSAGFKRTSTLTVQDQEELCNGKCKSKQLCRSQSLLLRSSTRRNSYINTPVAEIIMKPNVGQGSTSVQTAMESELGESSATINKRLCKSTIELSENSLLPASSMLTGTQSLLQPHLERVAIDALQLCCLLLPPPNRRKLQLLMRMISRMSQNVDMPKLHDAMGTRSLMIHTFSRCVLCCAEEVDLDELLAGRLVSFLMDHHQEILQVPSYLLDC

SEQ ID NO: 564 - protein, 1142 aa, Homo sapiens
MPEAKPAAKKAPKGKDAPKGAPKEAPPKEAPAEAPKEAPPEDQSPTAEEPTGVFLKKPDSVSVETGKDAVVVAKVNGKELPDKPTIKWFKGKWLELGSKSGARFSFKESHNSASNVYTVELHIGKVVLGDRGYYRLEVKAKDTCDSCGFNIDVEAPRQDASGQSLESFKRTSEKKSDTAGELDFSGLLKKREVVEEEKKKKKKDDDDLGIPPEIWELLKGAKKSEYEKIAFQYGITDLRGMLKRLKKAKVEVKKSAAFTKKLDPAYQVDRGNKIKLMVEISDPDLTLKWFKNGQEIKPSSKYVFENVGKKRILTINKCTLADDAAYEVAVKDEKCFTELFVKEPPVLIVTPLEDQQVFVGDRVEMAVEVSEEGAQVMWMKDGVELTREDSFKARYRFKKDGKRHILIFSDVVQEDRGRYQVITNGGQCEAELIVEEKQLEVLQDIADLTVKASEQAVFKCEVSDEKVTGKWYKNGVEVRPSKRITISHVGRFHKLVIDDVRPEDEGDYTFVPDGYALGSLSAKLNFLEIKVEYVPKQEPPKIHLDCSGKTSENAIVVVAGNKLRLDVSITGEPPPVATWLKGDEVFTTTEGRTRIEKRVDCSSFVIESAQREDEGRYTIKVTNPVGEDVASIFLQVVDVPDPPEAVRITSVGEDWAILVWEPPMYDGGKPVTGYLVERKKKGSQRWMKLNFEVFTETTYESTKMIEGILYEMRVFAVNAIGVSQPSMNTKPFMPIAPTSEPLHLIVEDVTDTTTTLKWRPPNRIGAGGIDGYLVEYCLEGSEEWVPANTEPVERCGFTVKNLPTGARILFRVVGVNIAGRTEPATLAQPVTIREIAEPPKIRLPRHLRQTYIRKVGEQLNLVVPFQGKPRPQVVWTKGGAPLDTSRVHVRTSDFDTVFFVRQAARSDSGEYELSVQIENMKDTATIRIRVVEKAGPPINVMVKEVWGTNALVEWQAPKDDGNSEIMGYFVQKADKKTMEWFNVYERNRHTSCTVSDLIVGNEYYFRVYTENICGLSDSPGVSKNTARILKTGITFKPFEYKEHDFRMAPKFLTPLIDRVVVAGYSAALNCAVRGHPKPKVVWMKNKMEIREDPKFLITNYQGVLTLNIRRPSPFDAGTYTCRAVNELGEALAECKLEVRVPQ

SEQ ID NO: 565 - protein, 1587 aa, Homo sapiens
MGDVKALLFVVAARARRLGGAAASESLAVSEAFCRVRSCQPKKCAGPQRCLNPVPAVPSPSPSVRKRQVSLNWQPLTLQEARALLKRRRPRGPGGRGLLRRRPPQRAPAGKAPVLCPLICHNGGVCVKPDRCFCPPDFAGKFCQLHSSGARPPAPAVPGLTRSVYTMPLANHRDDEHGVASMVSVHVEHPQEASVVVHQVERVSGPWEEADAEAVARAEAAARAEAAAPYTVLAQSAPREDGYSDASGFGYCFRELRGGECASPLPGLRTQEVCCRGAGLAWGVHDCQLCSERLGNSERVSAPDGPCPTGFERVNGSCEDVDECATGGRCQHGECANTRGGYTCVCPDGFLLDSSRSSCISQHVISEAKGPCFRVLRDGGCSLPILRNITKQICCCSRVGKAWGRGCQLCPPFGSEGFREICPAGPGYHYSASDLRYNTRPLGQEPPRVSLSQPRTLPATSRPSAGFLPTHRLEPRPEPRPDPRPGPELPLPSIPAWTGPEIPESGPSSGMCQRNPQVCGPGRCISRPSGYTCACDSGFRLSPQGTRCIDVDECRRVPPPCAPGRCENSPGSFRCVCGPGFRAGPRAAECLDVDECHRVPPPCDLGRCENTPGSFLCVCPAGYQAAPHGASCQDVDECTQSPGLCGRGGCKNLPGSFRCVCPAGFRGSACEEDVDECAQEPPPCGPGRCDNTAGSFHCACPAGFRSRGPGAPCQDVDECARSPPPCTYGRCENTEGSFQCVCPMGFQPNTAGSECEDVDECENHLACPGQECVNSPGSFQCRTCPSGHHLHRGRCTDVDECSSGAPPCGPHGHCTNTEGSFRCSCAPGYRAPSGRPGPCADVNECLEGDFCFPHGECLNTDGSFACTCAPGYRPGPRGASCLDVDECSEEDLCQSGICTNTDGSFECICPPGHRAGPDLASCLDVDECRERGPALCGSQRCENSPGSYRCVRDCDPGYHAGPEGTCDDVDECQEYGPEICGAQRCENTPGSYRCTPACDPGYQPTPGGGCQDVDECRNRSFCGAHAVCQNLPGSFQCLCDQGYEGARDGRHCVDVNECETLQGVCGAALCENVEGSFLCVCPNSPEEFDPMTGRCVPPRTSVGMSPGSQPQAPVSPVLPARPPPPPLSRRPRKPRKGPVGSGCRECYFDTAAPDACDNILARNVTWQECCCTVGEGWGSGCRIQQCPGTETAEYQSLCPHGRGYLAPSGDLSLRRDVDECQLFRDQVCKSGVCVNTAPGYSCYCSNGYYYHTQRLECIDNDECADEEPACEGGRCVNTVGSYHCTCEPPLVLDGSQRRCVSNESQSLDDNLGVCWQEVGADLVCSHPRLDRQATYTECCCLYGEAWGMDCALCPAQDSDDFEALCNVLRPPAYSPPRPGGFGLPYEYGPDLGPPYQGLPYGPELYPPPALPYDPYPPPPGPFARREAPYGAPRFDMPDFEDDGGPYGESEAPAPPGPGTRWPYRSRDTRRSFPEPEEPPEGGSYAGSLAEPYEELEAEECGILDGCTNDRCVRVPEGFTCRCFDGYRLDMTRMACVDINECDEAEAASPLCVNARCLNTDGSFRCICRPGFAPTHQPHHCAPARPRA

SEQ ID NO: 566 - protein, 2316 aa, Homo sapiens
MTTLLWVFVTLRVITAAVTVETSDHDNSLSVSIPQPSPLRVLLGTSLTIPCYFIDPMHPVTTAPSTAPLAPRIKWSRVSKEKEVVLLVATEGRVRVNSAYQDKVSLPNYPAIPSDATLEVQSLRSNDSGVYRCEVMHGIEDSEATLEVVVKGIVFHYRAISTRYTLDFDRAQRACLQNSAIIATPEQLQAAYEDGFHQCDAGWLADQTVRYPIHTPREGCYGDKDEFPGVRTYGIRDTNETYDVYCFAEEMEGEVFYATSPEKFTFQEAANECRRLGARLATTGHVYLAWQAGMDMCSAGWLADRSVRYPISKARPNCGGNLLGVRTVYVHANQTGYPDPSSRYDAICYTGEDFVDIPENFFGVGGEEDITVQTVTWPDMELPLPRNITEGEARGSVILTVKPIFEVSPSPLEPEEPFTFAPEIGATAFAEVENETGEATRPWGFPTPGLGPATAFTSEDLVVQVTAVPGQPHLPGGVVFHYRPGPTRYSLTFEEAQQACPGTGAVIASPEQLQAAYEAGYEQCDAGWLRDQTVRYPIVSPRTPCVGDKDSSPGVRTYGVRPSTETYDVYCFVDRLEGEVFFATRLEQFTFQEALEFCESHNATATTGQLYAAWSRGLDKCYAGWLADGSLRYPIVTPRPACGGDKPGVRTVYLYPNQTGLPDPLSRHHAFCFRGISAVPSPGEEEGGTPTSPSGVEEWIVTQVVPGVAAVPVEEETTAVPSGETTAILEFTTEPENQTEWEPAYTPVGTSPLPGILPTWPPTGAETEESTEGPSATEVPSASEEPSPSEVPFPSEEPSPSEEPFPSVRPFPSVELFPSEEPFPSKEPSPSEEPSASEEPYTPSPPEPSWTELPSSGEESGAPDVSGDFTGSGDVSGHLDFSGQLSGDRASGLPSGDLDSSGLTSTVGSGLTVESGLPSGDEERIEWPSTPTVGELPSGAEILEGSASGVGDLSGLPSGEVLETSASGVGDLSGLPSGEVLETTAPGVEDISGLPSGEVLETTAPGVEDISGLPSGEVLETTAPGVEDISGLPSGEVLETTAPGVEDISGLPSGEVLETTAPGVEDISGLPSGEVLETAAPGVEDISGLPSGEVLETAAPGVEDISGLPSGEVLETAAPGVEDISGLPSGEVLETAAPGVEDISGLPSGEVLETAAPGVEDISGLPSGEVLETAAPGVEDISGLPSGEVLETAAPGVEDISGLPSGEVLETAAPGVEDISGLPSGEVLETAAPGVEDISGLPSGEVLETAAPGVEDISGLPSGEVLETAAPGVEDISGLPSGEVLETTAPGVEEISGLPSGEVLETTAPGVDEISGLPSGEVLETTAPGVEEISGLPSGEVLETSTSAVGDLSGLPSGGEVLEISVSGVEDISGLPSGEVVETSASGIEDVSELPSGEGLETSASGVEDLSRLPSGEEVLEISASGFGDLSGVPSGGEGLETSASEVGTDLSGLPSGREGLETSASGAEDLSGLPSGKEDLVGSASGDLDLGKLPSGTLGSGQAPETSGLPSGFSGEYSGVDLGSGPPSGLPDFSGLPSGFPTVSLVDSTLVEVVTASTASELEGRGTIGISGAGEISGLPSSELDISGRASGLPSGTELSGQASGSPDVSGEIPGLFGVSGQPSGFPDTSGETSGVTELSGLSSGQPGVSGEASGVLYGTSQPFGITDLSGETSGVPDLSGQPSGLPGFSGATSGVPDLVSGTTSGSGESSGITFVDTSLVEVAPTTFKEEEGLGSVELSGLPSGEADLSGKSGMVDVSGQFSGTVDSSGFTSQTPEFSGLPSGIAEVSGESSRAEIGSSLPSGAYYGSGTPSSFPTVSLVDRTLVESVTQAPTAQEAGEGPSGILELSGAHSGAPDMSGEHSGFLDLSGLQSGLIEPSGEPPGTPYFSGDFASTTNVSGESSVAMGTSGEASGLPEVTLITSEFVEGVTEPTISQELGQRPPVTHTPQLFESSGKVSTAGDISGATPVLPGSGVEVSSVPESSSETSAYPEAGFGASAAPEASREDSGSPDLSETTSAFHEANLERSSGLGVSGSTLTFQEGEASAAPEVSGESTTTSDVGTEAPGLPSATPTASGDRTEISGDLSGHTSQLGVVISTSIPESEWTQQTQRPAETHLEIESSSLLYSGEETHTVETATSPTDASIPASPEWKRESESTAADQEVCEEGWNKYQGHCYRHFPDRETWVDAERRCREQQSHLSSIVTPEEQEFVNNNAQDYQWIGLNDRTIEGDFRWSDGHPMQFENWRPNQPDNFFAAGEDCVVMIWHEKGEWNDVPCNYHLPFTCKKGTATTYKRRLQKRSSRHPRRSRPSTAH

SEQ ID NO: 567 - protein, 228 aa, Homo sapiens
MQPRRQRLPAPWSGPRGPRPTAPLLALLLLLAPVAAPAGSGGPDDPGQPQDAGVPRRLLQQKARAALHFFNFRSGSPSALRVLAEVQEGRAWINPKEGCKVHVVFSTERYNPESLLQEGEGRLGKCSARVFFKNQKPRPTINVTCTRLIEKKKRQQEDYLLYKQMKQLKNPLEIVSIPDNHGHIDPSLRLIWDLAFLGSSYVMWEMTTQVSHYYLAQLTSVRQWVRKT

SEQ ID NO: 568 - protein, 419 aa, Homo sapiens
MASIFSKLLTGRNASLLFATMGTSVLTTGYLLNRQKVCAEVREQPRLFPPSADYPDLRKHNNCMAECLTPAIYSKLRNKVTPNGYTLDQCIQTGVDNPGHPFIKTVGMVAGDEESYEVFADLFDPVIKLRHNGYDPRVMKHTTDLDASKITQGQFDEHYVLSSRVRTGRSIRGLSLPPACTRAERREVENVAITALEGLKGDLAGRYYKLSEMTEQDQQRLIDDHFLFDKPVSPLLTCAGMARDWPDARGIWHNYDKTFLIWINEEDHTRVISMEKGGNMKRVFERFCRGLKEVERLIQERGWEFMWNERLGYILTCPSNLGTGLRAGVHVRIPKLSKDPRFSKILENLRLQKRGTGGVDTAAVADVYDISNIDRIGRSEVELVQIVIDGVNYLVDCEKKLERGQDIKVPPPLPQFGKK

SEQ ID NO: 569 - protein, 60 aa, Homo sapiens
MDAVSQVPMEVVLPKHILDIWVIVLIILATIVIMTSLLLCPATAVIIYRMRTHPILSGAV

SEQ ID NO: 570 - protein, 187 aa, Homo sapiens
MVAATVAAAWLLLWAAACAQQEQDFYDFKAVNIRGKLVSLEKYRGSVSLVVNVASECGFTDQHYRALQQLQRDLGPHHFNVLAFPCNQFGQQEPDSNKEIESFARRTYSVSFPMFSKIAVTGTGAHPAFKYLAQTSGKEPTWNFWKYLVAPDGKVVGAWDPTVSVEEVRPQITALVRKLILLKREDL

SEQ ID NO: 571 - protein, 538 aa, Homo sapiens
MWSGRSSFTSLVVGVFVVYVVHTCWVMYGIVYTRPCSGDANCIQPYLARRPKLQLSVYTTTRSHLGAENNIDLVLNVEDFDVESKFERTVNVSVPKKTRNNGTLYAYIFLHHAGVLPWHDGKQVHLVSPLTTYMVPKPEEINLLTGESDTQQIEAEKKPTSALDEPVSHWRPRLALNVMADNFVFDGSSLPADVHRYMKMIQLGKTVHYLPILFIDQLSNRVKDLMVINRSTTELPLTVSYDKVSLGRLRFWIHMQDAVYSLQQFGFSEKDADEVKGIFVDTNLYFLALTFFVAAFHLLFDFLAFKNDISFWKKKKSMIGMSTKAVLWRCFSTVVIFLFLLDEQTSLLVLVPAGVGAAIELWKVKKALKMTIFWRGLMPEFQFGTYSESERKTEEYDTQAMKYLSYLLYPLCVGGAVYSLLNIKYKSWYSWLINSFVNGVYAFGFLFMLPQLFVNYKLKSVAHLPWKAFTYKAFNTFIDDVFAFIITMPTSHRLACFRDDVVFLVYLYQRWLYPVDKRRVNEFGESYEEKATRAPHTD

SEQ ID NO: 572 - protein, 1210 aa, Homo sapiens
MTLSGSRGQEEPPPSRVPRAVRVASLLSEGEELSGDDQGDEEEDDHAYEGVPNGGWHTSSLSLSLPSTIAAPHPMDGPPGGSTPVTPVIKAGWLDKNPPQGSYIYQKRWVRLDTDHLRYFDSNKDAYSKRFISVACISHVAAIGDQKFEVITNNRTFAFRAESDVERKEWMQALQQAMAEQRARARLSSAYLLGVPGSEQPDRAGSLELRGFKNKLYVAVVGDKVQLYKNLEEYHLGIGITFIDMSVGNVKEVDRRSFDLTTPYRIFSFSADSELEKEQWLEAMQGAIAEALSTSEVAERIWAAAPNRFCADCGAPQPDWASINLCVVICKRCAGEHRGLGAGVSKVRSLKMDRKVWTETLIELFLQLGNGAGNRFWAANVPPSEALQPSSSPSTRRCHLEAKYREGKYRRYHPLFGNQEELDKALCAAVTTTDLAETQALLGCGAGINCFSGDPEAPTPLALAEQAGQTLQMEFLRNNRTTEVPRLDSMKPLEKHYSVVLPTVSHSGFLYKTASAGKLLQDRRAREEFSRRWCVLGDGVLSYFENERAVTPNGEIRASEIVCLAVPPPDTHGFEHTFEVYTEGERLYLFGLESAEQAHEWVKCIAKAFVPPLAEDLLARDFERLGRLPYKAGLSLQRAQEGWFSLSGSELRAVFPEGPCEEPLQLRKLQELSIQGDSENQVLVLVERRRTLYIQGERRLDFMGWLGAIQKAAASMGDTLSEQQLGDSDIPVIVYRCVDYITQCGLTSEGIYRKCGQTSKTQRLLESLRQDARSVHLKEGEQHVDDVSSALKRFLRDLPDGLFTRAQRLTWLEASEIEDEEEKVSRYRELLVRLPPVNRATVKALISHLYCVQCFSDTNQMNVHNLAIVFGPTLFQTDGQDYKAGRVVEDLINHYVVVFSVDEEELRKQREEITAIVKMRVAGTASGTQHAGDFICTVYLEEKKAETEQHIKVPASMTAEELTLEILDRRNVGIREKDYWTCFEVNEREEAERPLHFAEKVLPILHGLGTDSHLVVKKHQAMEAMLLYLASRVGDTKHGMMKFREDRSLLGLGLPSGGFHDRYFILNSSCLRLYKEVRSQRPWSGAPETSHRPEKEWPIKSLKVYLGVKKKLRPPTCWGFTVVHETEKHEKQQWYLCCDTQMELREWFATFLFVQHDGLVWPSEPSRVSRAVPEVRLGSVSLIPLRGSENEMRRSVAAFTADPLSLLRNV

SEQ ID NO: 573 - protein, 201 aa, Homo sapiens [sequence omitted]

SEQ ID NO: 574 - protein, 396 aa, Homo sapiens
MTTLVLDNGAYNAKIGYSHENVSVIPNCQFRSKTARLKTFTANQIDEIKDPSGLFYILPFQKGYLVNWDVQRQVWDYLFGKEMYQVDFLDTNIIITEPYFNFTSIQESMNEILFEEYQFQAVLRVNAGALSAHRYFRDNPSELCCIIVDSGYSFTHIVPYCRSKKKKEAIIRINVGGKLLTNHLKEIISYRQLHVMDETHVINQVKEDVCYVSQDFYRDMDIAKLKGEENTVMIDYVLPDFSTIKKGFCKPREEMVLSGKYKSGEQILRLANERFAVPEILFNPSDIGIQEMGIPEAIVYSIQNLPEEMQPHFFKNIVLTGGNSLFPGFRDRVYSEVRCLTPTDYDVSVVLPENPITYAWEGGKLISENDDFEDMVVTREDYEENGHSVCEEKFDI

SEQ ID NO: 575 - DNA, 44 bp, Homo sapiens
ttccccatctgaggcgtttgttgcagctacctgcacttctagat

SEQ ID NO: 576 - protein, 205 aa, Homo sapiens
MDDKPNPEALSDSSERLFSFGVIADVQFADLEDGFNFQGTRRRYYRHSLLHLQGAIEDWNNESSMPCCVLQLGDIIDGYNAQYNASKKSLELVMDMFKRLKVPVHHTWGNHEFYNFSREYLTHSKLNTKFLEDQIVHHPETMPSEDYYAYHFVPFPKFRFILLDAYDLSVLGVDQSSPKYEQCMKILREHNPNTELNSPQGELFL

SEQ ID NO: 577 - protein, 84 aa, Homo sapiens
MALSSQIWAACLLLLLLLASLTSGSVFPQQTGQLAELQPQDRAGARASWMPMFQRRRRRDTHFPICIFCCGCCHRSKCGMCCKT

SEQ ID NO: 578 - protein, 84 aa, Homo sapiens; identical to SEQ ID NO: 577

SEQ ID NO: 579 - protein, 399 aa, Homo sapiens
MRPERPRPRGSAPGPMETPPWDPARNDSLPPTLTPAVPPYVKLGLTVVYTVFYALLFVFIYVQLWLVLRYRHKRLSYQSVFLFLCLFWASLRTVLFSFYFKDFVAANSLSPFVFWLLYCFPVCLQFFTLTLMNLYFTQVIFKAKSKYSPELLKYRLPLYLASLFISLVFLLVNLTCAVLVKTGNWERKVIVSVRVAINDTLFVLCAVSLSICLYKISKMSLANIYLESKGSSVCQVTAIGVTVILLYTSRACYNLFILSFSQNKSVHSFDYDWYNVSDQADLKNQLGDAGYVLFGVVLFVWELLPTTLVVYFFRVRNPTKDLTNPGMVPSHGFSPRSYFFDNPRRYDSDDDLAWNIAPQGLQGGFAPDYYDWGQQTNSFLAQAGTLQDSTLDPDKPSLG

SEQ ID NO: 580 - protein, 698 aa, Homo sapiens
SGNIRMAQGSHQIDFQVLHDLRQKFPEVPEVVVSRCMLQNNNNLDACCAVLSQESTRYLYGEGDLNFSDDSGISGLRNHMTSLNLDLQSQNIYHHGREGSRMNGSRTLTHSISDGQLQGGQSNSELFQQEPQTAPAQVPQGFNVFGMSSSSGASNSAPHLGFHLGSKGTSSLSQQTPRFNPIMVTLAPNIQTGRNTPTSLHIHGVPPPVLNSPQGNSIYIRPYITTPGGTTRQTQQHSGWVSQFNPMNPQQVYQPSQPGPWTTCPASNPLSHTSSQQPNQQGHQTSHVYMPISSPTTSQPPTIHSSGSSQSSAHSQYNIQNISTGPRKNQIEIKLEPPQRNNSSKLRSSGPRTSSTSSSVNSQTLNRNQPTVYIAASPPNTDELMSRSQPKVYISANAATGDEQVMRNQPTLFISTNSGASAASRNMSGQVSMGPAFIHHHPPKSRAIGNNSATSPRVVVTQPNTKYTFKITVSPNKPPAVSPGVVSPTFELTNLLNHPDHYVETENIQHLTDPTLAHVDRISETRKLSMGSDDAAYTQALLVHQKARMERLQRELEIQKKKLDKLKSEVNEMENNLTRRRLKRSNSISQIPSLEEMQQLRSCNRQLQIDIDCLTKEIDLFQARGPHFNPSAIHNFYDNIGFVGPVPPKPKDQRSIIKTPKTQDTEDDEGAQWNCTACTFLNHPALIRCEQCEMPRHF

SEQ ID NO: 581 - protein, 423 aa, Homo sapiens
MLRVRCLRGGSRGAEAVHYIGSRLGRTLTGWVQRTFQSTQAATASSRNSCAADDKATEPLPKDCPVSSYNEWDPLEEVIVGRAENACVPPFTIEVKANTYEKYWPFYQKQGGHYFPKDHLKKAVAEIEEMCNILKTEGVTVRRPDPIDWSLKYKTPDFESTGLYSAMPRDILIVVGNEIIEAPMAWRSRFFEYRAYRSIIKDYFHRGAKWTTAPKPTMADELYNQDYPIHSVEDRHKLAAQGKFVTTEFEPCFDAADFIRAGRDIFAQRSQVTNYLGIEWMRRHLAPDYRVHIISFKDPNPMHIDATFNIIGPGIVLSNPDRPCHQIDLFKKAGWTIITPPTPIIPDDHPLWMSSKWLSMNVLMLDEKRVMVDANEVPIQKMFEKLGITTIKVNIRNANSLGGGFHCWTCDVRRRGTLQSYLD

SEQ ID NO: 582 - protein, 880 aa, Homo sapiens
MQPGATTCTEDRIQHALERCLHGLSLSRRSTSWSAGLCLNCWSLQELVSRDPGHFLILLEQILQKTREVQEKGTYDLLTPLALLFYSTVLCTPHFPPDSDLLLKAASTYHRFLTWPVPYCSICQELLTFIDAELKAPGISYQRLVRAEQGLPIRSHRSSTVTVLLLNPVEVQAEFLAVANKLSTPGHSPHSAYTTLLLHAFQATFGAHCDVPGLHCRLQAKTLAELEDIFTETAEAQELASGIGDAAEARRWLRTKLQAVGEKAGFPGVLDTAKPGKLHTIPIPVARCYTYSWSQDSFDILQEILLKEQELLQPGILGDDEEEEEEEEEVEEDLETDGHCAERDSLLSTSSLASHDSTLSLASSQASGPALSRHLLTSFVSGLSDGMDSGYVEDSEESSSEWPWRRGSQERRGHRRPGQKFIRIYKLFKSTSQLVLRRDSRSLEGSSDTALPLRRAGSLCSPLDEPVSPPSRAQRSRSLPQPKLGTQLPSWLLAPASRPQRRRPFLSGDEDPKASTLRVVVFGSDRISGKVARAYSNLRRLENNRPLLTRFFKLQFFYVPVKRSHGTSPGACPPPRSQTPSPPTDSPRHASPGELGTTPWEESTNDISHYLGMLDPWYERNVLGLMHLPPEVLCQQSLKAEAQALEGSPTQLPILADMLLYYCRFAARPVLLQLYQTELTFITGEKTTEIFIHSLELGHSAATRAIKASGPGSKRLGIDGDREAVPLTLQIIYSKGAISGRSRWSNLEKVCTSVNLNKACRKQEELDSSMEALTLNLTEVVKRQNSKSKKGFNQISTSQIKVDKVQIIGSNSCPFAVCLDQDERKILQSVVRCEVSPCYKPEKSDLSSPPQTPPDLPAQAAPDLCSLLCLPIMTFSGALP

SEQ ID NO: 583 - protein, 317 aa, Homo sapiens
MLWMANTTELLSFVQEKVLEMEKEADQEDPQLCNDLELCDEAMALLDEVIMCTFQQSVYYLTKTLYSTLPALLDSNPFTAGAELPGPGAELGAMPPGLRPTLGVFQAALELTSQCELHPDLVSQTFGYLFFFSNASLLNSLMERGQGRPFYQWSRAVQIRTNLDLVLDWLQGAGLGDIATEFFRKLSMAVNLLCVPRTSLLKASWSSLRTDHPTLTPAQLHHLLSHYQLGPGRGPPAAWDPPPAEREAVDTGDIFESFSSHPPLILPLGSSRLRLTGPVTDDALHRELRRLRRLLWDLEQQELPANYRHGPPVATSP

SEQ ID NO: 584 - protein, 409 aa, Homo sapiens
MKLKQRVVLLAILLVIFIFTKVFLIDNLDTSAANREDQRAFHRMMTGLRVELAPKLDHTLQSPWEIAAQWVVPREVYPEETPELGAVMHAMATKKIIKADVGYKGTQLKALLILEGGQKVVFKPKRYSRDHVVEGEPYAGYDRHNAEVAAFHLDRILGFHRAPLVVGRFVNLRTEIKPVATEQLLSTFLTVGNNTCFYGKCYYCRETEPACADGDIMEGSVTLWLPDVWPLQKHRHPWGRTYREGKLARWEYDESYCDAVKKTSPYDSGPRLLDIIDTAVFDYLIGNADRHHYESFQDDEGASMLILLDNAKSFGNPSLDERSILAPLYQCCIIRVSTWNRLNYLKNGVLKSALKSAMAHDPISPVLSDPHLDAVDQRLLSVLATVKQCTDQFGMDTVLVEDRMPLSHL

SEQ ID NO: 585 - protein, 134 aa, Homo sapiens
MNRVNDPLIFIRDIKPGLKNLNVVFIVLEIGRVTKTKDGHEVRSCKVADKTGSITISVWDEIGGLIQPGDIIRLTRGYASMWKGCLTLYTGRGGELQKIGDLGAVQAAAMRDSIHYYPGNDLHPDLEEPSSLGV

SEQ ID NO: 586 - protein, 115 aa, Homo sapiens
MQAQAPVVVVTQPGVGPGPAPQNSNWQTGMCDCFSDCGVCLCGTFCFPCLGCQVAADMNECCLCGTSVAMRTLYRTRYGIPGSICDDYMATLCCPHCTLCQIKRDINRRRAMRTF

SEQ ID NO: 587 - protein, 292 aa, Homo sapiens
MGTQKPPRPEASCGCTGRCGSDAPPALSRAARQDPPAGPRHDSPAAQPWSPFSSTPGGSLASRGLPGCPQNQPGRAAPAPERRLQGGRNAGLVVRLGSDWSSGASPGTSPPRAGARLRGLRTQILPPLTLAKPARRPQQQFRLRRPSGITWPPTLGPRSCTCVPDRLRLFPAARGASGVLGAASLTFGYFRVPGAPLSRQRAAAQRPGRAGRVPLEWAGWGGGRRHHTPEAKRDKREMQNKNMLCLVTRWVGPEGRVASNRQRMASQYRPLDAARTLRRPKALDCGLEGEAL

SEQ ID NO: 588 - protein, 292 aa, Homo sapiens; identical to SEQ ID NO: 587

SEQ ID NO: 589 - protein, 1496 aa, Homo sapiens; identical to SEQ ID NO: 500

SEQ ID NO: 590 - protein, 456 aa, Homo sapiens [sequence omitted]

SEQ ID NO: 591 - protein, 456 aa, Homo sapiens [sequence omitted]

SEQ ID NO: 592 - DNA, 2009 bp, Homo sapiens
ggctgcagggctccggcaaccgctccggcaacgccaaccgctccgctgcgcgcaggctgggctgcaggctctcggctgcagcgctgggtgtcttcaggcctatggagagcagcttgcgtgggctgggcctgcagtacctggtttgcatagatgattggcaggtggatctaggatccggcttccaacatgtggcagctctgggcctccctctgctgcctgctggtgttggccaatgcccggagcaggccctctttccatcccgtgtcggatgagctggtcaactatgtcaacaaacggaataccacgtggcaggccgggcacaacttctacaacgtggacatgagctacttgaagaggctatgtggtaccttcctgggtgggcccaagccaccccagagagttatgtttaccgaggacctgaagctgcctgcaagcttcgatgcacgggaacaatggccacagtgtcccaccatcaaagagatcagagaccagggctcctgtggctcctgctgggccttcggggctgtggaagccatctctgaccggatctgcatccacaccaatgcgcacgtcagcgtggaggtgtcggcggaggacctgctcacctgctgtggcagcatgtgtggggacggctgtaatggtggctatcctgctgaagcttggaacttctggacaagaaaaggcctggtttctggtggcctctatgaatcccatgtagggtgcagaccgtactccatccctccctgtgagcaccacgtcaacggctcccggcccccatgcacgggggagggagatacccccaagtgtagcaagatctgtgagcctggctacagcccgacctacaaacaggacaagcactacggatacaattcctacagcgtctccaatagcgagaaggacatcatggccgagatctacaaaaacggccccgtggagggagctttctctgtgtattcggacttcctgctctacaagtcaggagtgtaccaacacgtcaccggagagatgatgggtggccatgccatccgcatcctgggctggggagtggagaatggcacaccctactggctggttgccaactcctggaacactgactggggtgacaatggcttctttaaaatactcagaggacaggatcactgtggaatcgaatcagaagtggtggctggaattccacgcaccgatcagtactgggaaaagatctaatctgccgtgggcctgtcgtgccagtcctgggggcgagatcggggtagaaatgcattttattctttaagttcacgtaagatacaagtttcagacagggtctgaaggactggattggccaaacatcagacctgtcttccaaggagaccaagtcctggctacatcccagcctgtggttacagtgcagacaggccatgtgagccaccgctgccagcacagagcgtccttccccctgtagactagtgccgtagggagtacctgctgccccagctgactgtggccccctccgtgatccatccatctccagggagcaagacagagacgcaggaatggaaagcggagttcctaacaggatgaaagttctcccatcagttcccccagtacctccaagcaagtagctttccacatttgtcacagaaatcagaggagagatggtgttgggagccctttggagaacgccagtctcccaggccccctgcatctatcgagtttgcaatgtcacaacctctctgatcttgtgctcagcatgattctttaatagaagttttattttttcgtgcactctgctaatcatgtgggtgagccagtggaacagcgggagacctgtgctagttttacagattgcctcctaatgacgcggctcaaaaggaaaccaagtggtcaggagttgtttctgacccactgatctctactaccacaaggaaaatagtttaggagaaaccagcttttactgtttttgaaaaattagcttcaccctgtcaagttaacaaggaatgcctgtgccaataaaaggtttctccaacttg

SEQ ID NO: 593 - protein, 223 aa, Homo sapiens
MKLHYVAVLTLAILMFLTWLPESLSCNKALCASDVSKCLIQELCQCRPGEGNCSCCKECMLCLGALWDECCDCVGMCNPRNYSDTPPTSKSTVEELHEPIPSLFRALTEGDTQLNWNIVSFPVAEELSHHENLVSFLETVNQPHHQNVSVPSNNVHAPYSSDKEHMCTVVYFDDCMSIHQCKISCESMGASKYRWFHNACCECIGPECIDYGSKTVKCMNCMF

SEQ ID NO: 594 - protein, 701 aa, Homo sapiens
MDIEDEENMSSSSTDVKENRNLDNVSPKDGSTPGPGEGSQLSNGGGGGPGRKRPLEEGSNGHSKYRLKKRRKTPGPVLPKNALMQLNEIKPGLQYTLLSQTGPVHAPLFVMSVEVNGQVFEGSGPTKKKAKLHAAEKALRSFVQFPNASEAHLAMGRTLSVNTDFTSDQADFPDTLFNGFETPDKAEPPFYVGSNGDDSFSSSGDLSLSASPVPASLAQPPLPVLPPFPPPSGKNPVMILNELRPGLKYDFLSESGESHAKSFVMSVVVDGQFFEGSGRNKKLAKARAAQSALAAIFNLHLDQTPSRQPIPSEGLQLHLPQVLADAVSRLVLGKFGDLTDNFSSPHARRKVLAGVVMTTGTDVKDAKVISVSTGTKCINGEYMSDRGLALNDCHAEIISRRSLLRFLYTQLELYLNNKDDQKRSIFQKSERGGFRLKENVQFHLYISTSPCGDARIFSPHEPILEEPADRHPNRKARGQLRTKIESGEGTIPVRSNASIQTWDGVLQGERLLTMSCSDKIARWNVVGIQGSLLSIFVEPIYFSSIILGSLYHGDHLSRAMYQRISNIEDLPPLYTLNKPLLSGISNAEARQPGKAPNFSVNWTVGDSAIEVINATTGKDELGRASRLCKHALYCRWMRVHGKVPSHLLRSKITKPNVYHESKLAAKEYQAAKARLFTAFIKAGLGAWVEKPTEQDQFSLTP

SEQ ID NO: 595 - protein, 486 aa, Homo sapiens
MISPSPSQEELQTTLEETDQSTQEPFTTKIPRTTELAKTTQAPHRFYTTVRPRTSDKPHIRPVLNRTTTRPTRPKPSGMPSGNGVGTGVKQAPRPSGADRNVSVDSTHPTKKPGTRRPPLPPRPTHPRRKPLPPNNVTGKPGSAGIISSGPITTPPLRSTPRPTGTPLERIETDIKQPTVPASGEELENITDFSSSPTRETDPLGKPRFKGPHVRYIQKPDNSPCSITDSVKRFPKEEATEGNATSPPQNPPTNLTVVTVEGCPSFVILDWEKPLNDTVTEYEVISRENGSFSGKNKSIQMTNQTFSTVENLKPNTSYEFQVKPKNPLGEGPVSNTVAFSTESADPRVSEPVSAGRDAIWTERPFNSDSYSECKGKQYVKRTWYKKFVGVQLCNSLRYKIYLSDSLTGKFYNIGDQRGHGEDHCQFVDSFLDGRTGQQLTSDQLPIKEGYFRAVRQEPVQFGEIGGHTQINYVQWYECGTTIPGKW

SEQ ID NO: 596 - protein, 1002 aa, Homo sapiens
MFHLRTCAAKLRPLTASQTVKTFSQNRPAAARTFQQIRCYSAPVAAEPFLSGTSSNYVEEMYCAWLENPKSVHKSWDIFFRNTNAGAPPGTAYQSPLPLSRGSLAAVAHAQSLVEAQPNVDKLVEDHLAVQSLIRAYQIRGHHVAQLDPLGILDADLDSSVPADIISSTDKLGFYGLDESDLDKVFHLPTTTFIGGQESALPLREIIRRLEMAYCQHIGVEFMFINDLEQCQWIRQKFETPGIMQFTNEEKRTLLARLVRSTRFEEFLQRKWSSEKRFGLEGCEVLIPALKTIIDKSSENGVDYVIMGMPHRGRLNVLANVIRKELEQIFCQFDSKLEAADEGSGDVKYHLGMYHRRINRVTDRNITLSLVANPSHLEAADPVVMGKTKAEQFYCGDTEGKKVMSILLHGDAAFAGQGIVYETFHLSDLPSYTTHGTVHVVVNNQIGFTTDPRMARSSPYPTDVARVVNAPIFHVNSDDPEAVMYVCKVAAEWRSTFHKDVVVDLVCYRRNGHNEMDEPMFTQPLMYKQIRKQKPVLQKYAELLVSQGVVNQPEYEEEISKYDKICEEAFARSKDEKILHIKHWLDSPWPGFFTLDGQPRSMSCPSTGLTEDILTHIGNVASSVPVENFTIHGGLSRILKTRGEMVKNRTVDWALAEYMAFGSLLKEGIHIRLSGQDVERGTFSHRHHVLHDQNVDKRTCIPMNHLWPNQAPYTVCNSSLSEYGVLGFEAGLRMASPNALVLWEAQFGDFHNTAQCIIDQFICPGQAKWVRQNGIVLLLPHGMEGMGPEHSSARPERFLQMCNDDPDVLPDLKEANFDINQLYDCNWVVVNCSTPGNFFHVLRRQILLPFRKPLIIFTPKSLLRHPEARSSFDEMLPGTHFQRVIPEDGPAAQNPENVKRLLFCTGKVYYDLTRERKARDMVGQVAITRIEQLSPFPFDLLLKEVQKYPNAELAWCQEEHKNQGYYDYVKPRLRTTISRAKPVWYAGRNPAAAPATGNKKTH

SEQ ID NO: 597 - protein, 228 aa, Homo sapiens
MLSRCRSGLLHVLGLSFLLQTRRPILLCSPRLMKPLVVFVLGGPGAGKGTQCARIVEKYGYTHLSAGELLRDERKNPDSQYGELIEKYIKEGKIVPVEITISLLKREMDQTMAANAQKNKFLIDGFPRNQDNLQGWNKTMDGKADVSFVLFFDCNNEICIERCLERGKSSGRSDDNRESLEKRIQTYLQSTKPIIDLYEEMGKVKKIDASKSVDEVFDEVVQIFDKEG

SEQ ID NO: 598 - protein, 647 aa, Homo sapiens; identical to SEQ ID NO: 466

SEQ ID NO: 599 - protein, 409 aa, Homo sapiens; identical to SEQ ID NO: 584

SEQ ID NO: 600 - protein, 287 aa, Homo sapiens
MHRLMGVNSTAAAAAGQPNVSCTCNCKRSLFQSMEITELEFVQIIIIVVVMMVMVVVITCLLSHYKLSARSFISRHSQGRRREDALSSEGCLWPSESTVSGNGIPEPQVYAPPRPTDRLAVPPFAQRERFHRFQPTYPYLQHEIDLPPTISLSDGEEPPPYQGPCTLQLRDPEQQLELNRESVRAPPNRTIFDSDLMDSARLGGPCPPSSNSGISATCYGSGGRMEGPPPTYSEVIGHYPGSSFQHQQSSGPPSLLEGTRLHHTHIAPLESAAIWSKEKDKQKGHPL

SEQ ID NO: 601 - protein, 844 aa, Homo sapiens [sequence omitted]

SEQ ID NO: 602 - protein, 457 aa, Homo sapiens
MLLPQLCWLPLLAGLLPPVPAQKFSALTFLRVDQDKDKDCSLDCAGSPQKPLCASDGRTFLSRCEFQRAKCKDPQLEIAYRGNCKDVSRCVAERKYTQEQARKEFQQVFIPECNDDGTYSQVQCHSYTGYCWCVTPNGRPISGTAVAHKTPRCPGSVNEKLPQREGTGKTVSLQIFSVLNSDDAAAPALETQPQGDEEDIASRYPTLWTEQVKSRQNKTNKNSVSSCDQEHQSALEEAKQPKNDNVVIPECAHGGLYKPVQCHPSTGYCWCVLVDTGRPIPGTSTRYEQPKCDNTARAHPAKARDLYKGRQLQGCPGAKKHEFLTSVLDALSTDMVHAASDPSSSSGRLSEPDPSHTLEERVVHWYFKLLDKNSSGDIGKKEIKPFKRFLRKKSKPKKCVKKFVEYCDVNNDKSISVQELMGCLGVAKEDGKADTKKRHTPRGHAESTSNRQPRKQG

SEQ ID NO: 603 - protein, 80 aa, Homo sapiens
MSLRKQTPSDFLKQIIGRPVVVKLNSGVDYRGVLACLDGYMNIALEQTEEYVNGQLKNKYGDAFIRGNNVLYISTQKRRM

SEQ ID NO: 604 - protein, 214 aa, Homo sapiens [sequence omitted]

SEQ ID NO: 605 - protein, 144 aa, Homo sapiens
MKSQWCRPVAMDLGVYQLRHFSISFLSSLLGTENASVRLDNSSSGASVVAIDNKIEQAMDLVKSHLMYAVREEVEVLKEQIKELIEKNSQLEQENNLLKTLASPEQLAQFQAQLQTGSPPATTQPQGTTQPPAQPASQGSGPTA

SEQ ID NO: 606 - protein, 444 aa, Homo sapiens
MGKGGNQGEGAAEREVSVPTFSWEEIQKHNLRTDRWLVIDRKVYNITKWSIQHPGGQRVIGHYAGEDATDAFRAFHPDLEFVGKFLKPLLIGELAPEEPSQDHGKNSKITEDFRALRKTAEDMNLFKTNHVFFLLLLAHIIALESIAWFTVFYFGNGWIPTLITAFVLATSQAQAGWLQHDYGHLSVYRKPKWNHLVHKFVIGHLKGASANWWNHRHFQHHAKPNIFHKDPDVNMLHVFVLGEWQPIEYGKKKLKYLPYNHQHEYFFLIGPPLLIPMYFQYQIIMTMIVHKNWVDLAWAVSYYIRFFITYIPFYGILGALLFLNFIRFLESHWFVWVTQMNHIVMEIDQEAYRDWFSSQLTATCNVEQSFFNDWFSGHLNFQIEHHLFPTMPRHNLHKIAPLVKSLCAKHGIEYQEKPLLRALLDIIRSLKKSGKLWLDAYLHK

SEQ ID NO: 607 - protein, 303 aa, Homo sapiens; identical to SEQ ID NO: 458

SEQ ID NO: 608 - protein, 1142 aa, Homo sapiens
MAFCAKMRSSKKTEVNLEAPEPGVEVIFYLSDREPLRLGSGEYTAEELCIRAAQACRISPLCHNLFALYDENTKLWYAPNRTITVDDKMSLRLHYRMRFYFTNWHGTNDNEQSVWRHSPKKQKNGYEKKKIPDATPLLDASSLEYLFAQGQYDLVKCLAPIRDPKTEQDGHDIENECLGMAVLAISHYAMMKKMQLPELPKDISYKRYIPETLNKSIRQRNLLTRMRINNVFKDFLKEFNNKTICDSSVSTHDLKVKYLATLETLTKHYGAEIFETSMLLISSENEMNWFHSNDGGNVLYYEVMVTGNLGIQWRHKPNVVSVEKEKNKLKRKKLENKDKKDEEKNKIREEWNNFSFFPEITHIVIKESVVSINKQDNKKMELKLSSHEEALSFVSLVDGYFRLTADAHHYLCTDVAPPLIVHNIQNGCHGPICTEYAINKLRQEGSEEGMYVLRWSCTDFDNILMTVTCFEKSEQVQGAQKQFKNFQIEVQKGRYSLHGSDRSFPSLGDLMSHLKKQILRTDNISFMLKRCCQPKPREISNLLVATKKAQEWQPVYPMSQLSFDRILKKDLVQGEHLGRGTRTHIYSGTLMDYKDDEGTSEEKKIKVILKVLDPSHRDISLAFFEAASMMRQVSHKHIVYLYGVCVRDVENIMVEEFVEGGPLDLFMHRKSDVLTTPWKFKVAKQLASALSYLEDKDLVHGNVCTKNLLLAREGIDSECGPFIKLSDPGIPITVLSRQECIERIPWIAPECVEDSKNLSVAADKWSFGTTLWEICYNGEIPLKDKTLIEKERFYESRCRPVTPSCKELADLMTRCMNYDPNQRPFFRAIMRDINKLEEQNPDIVSRKKNQPTEVDPTHFEKRFLKRIRDLGEGHFGKVELCRYDPEDNTGEQVAVKSLKPESGGNHIADLKKEIEILRNLYHENIVKYKGICTEDGGNGIKLIMEFLPSGSLKEYLPKNKNKINLKQQLKYAVQICKGMDYLGSRQYVHRDLAARNVLVESEHQVKIGDFGLTKAIETDKEYYTVKDDRDSPVFWYAPECLMQSKFYIASDVWSFGVTLHELLTYCDSDSSPMALFLKMIGPTHGQMTVTRLVNTLKEGKRLPCPPNCPDEVYQLMRKCWEFQPSNRTSFQNLIEGFEALLK

SEQ ID NO: 609 - protein, 303 aa, Homo sapiens
MAGAACEPVARPSLTSISSGELRSLWTCDCELALLPLAQLLRLQPGAFQLSGDQLVVAGPGEPAAARGGFNVFGDGLVRLDGQLYRLSSYIKRYVELTNYCDYKDYRETILSKPMLFFINVQTKKDTSKERTYAFLVNTRHPKIRRQIEQGMDMVISSVIGESYRLQFDFQEAVKNFFPPGNEVVNGENLSFAYEFKADALFDFFYWFGLSNSVVKVNGKVLNLSSTSPEKKETIKLFLEKMSEPLIRRSSFSDRKFSVTSRGSIDDVFNCNLSPRSSLTEPLLAELPFPSVLESEETPNQFI

SEQ ID NO: 610 - DNA, 2245 bp, Homo sapiens
  misc_feature 293, 652, 819, 842, 847, 1010, 1657, 1701, 1707, 1869, 1875,1913, 1973: n = A,T,C or G
gtcgactctaggcctaaatggccatttaggtgacactatagaagagctccaggatcataaacaaaacaaaaattccatgatttcttcttttgagacagagtctcgctctgtcacccaggctacagtgccatggcaccatctcagctcactgcagcttcaacttcccgagctcaagcaatcttcccacttcagcctcctaagtagttggactacaggtgtgagccatcttgctgggctaatttttaaattttttgtagagacgggggggggggggtctcaccatgttgcccagnctggtctcgaactcctggtctcctatcgcagcctcccaaagtgctgagattacaagcatgagccactgcgccgggtttcatgatttctttcactacttttatgatttcacctttaatattaaaatatttaatacatttggaattttggtgtaagaagtgtagagattccactttcaccccagctgattagtcatttgtttgtataaaattcattcattcaataatccaccacacacacacacacacacatattttcgttatgttctatatttcttgttatatctttttttcctattgaatcttgatgcatcttttattagaaccacggagccacagaactccgattctcggcaatgtgnggtatcaggctatgacctaaggcttgcaagcagaactaccgccaatctggcctctctggggttcccttcctcctgcaaggttgcaccaagcggcagttcggggaaatagggccttcaattacccagtgtgtatctcttgagtgtctgttaaataatggggggcaggncggggaggagggggagagggagnctgtncctcagtctttgttagccaggcagagcgtttattttccaggggttgtttcctttatcttcatcctaacattcaaacttgacttgagttttagcgcgcccccgccctacctcctcccaaagcccttatttgtccatccttgcctacaagctcagaacgagcagncaatggaatggatgtcgtgggagcaggcggttgagatgccagtgtttggaggctaaggactgggggctgtgagcgaggaccttcccgcgtttgctccgcgcccccgcagtttcctccgcgcccactagaaggcgccggggcgctcgcattcccccgcgcggagccgaagcagccgcaacgagccgggagctgagccgcgctgcgctgcggtgcgaagagccgggcggcggccagagccctccccgcgctgccagtgggacgcggagccagggatccccggctttgccccggggctggggtgcaacagactcttaacttggtcctcgcgccccgccaaccgcccccgggcaggaaacggccagaaccaccaccgcgccgcgctccacaaaagccccgggagttccaagacgggagggatcgggcgcgctccagaggcaggagggtcccccacaccctcaggctcatgcccagctcccccatcggacagcccccagccccatgaggaccctcaggcccgggcgagagcccggcacagcccggaccgaaattttgccgctgccttagagcgttagacaggtcagtgcccgggggtgggtgggggtgggattggttggtgaggggaggaggaggaggcgggaggaggcggnaggaggcgcgcttcccggtccactctgtcccccgcgccgcttgncgaggncactcatcgggtcacctccgccgggggcgcccgccagcacgggcatgattctgcattttttcctgacaggctaggtgtggagccgccctccgcagcccaccccggcccaggtgatgctcagactgaggagtcgggggcgcgccggccagggcgggcggcggncttggngactgccactgccctgatagagcgtgggggcttttccncttacgcacggccgcgtcgaaaccgcggcatccaaatgtcttcagcattaagatgccagncctcgggtgtgtgaggaaaccgagatgcaggagagggcgagaagaaaggaggccgggagaccctggggcctgggaagtgaggggaggggtaccgggaaaaccgcggctggcagtgcaaaccctagcgcgatgtgtggagtggagagcgctcttgggagccggcaggagcttctgaggacgcggggggcaagggccccatcccttgccctcccttcttccctccctttctcactccccaccctacccccacctaggatgtggctgggccgccg

SEQ ID NO: 611 - protein, 2201 aa, Homo sapiens [sequence omitted]

SEQ ID NO: 612 - protein, 205 aa, Homo sapiens
MALQLSREQGITLRGSAEIVAEFFSFGINSILYQRGIYPSETFTRVQKYGLTLLVTTDLELIKYLNNVVEQLKDWLYKCSVQKLVVVISNIESGEVLERWQFDIECDKTAKDDSAPREKSQKAIQDEIRSVIRQITATVTFLPLLEVSCSFDLLIYTDKDLVVPEKWEESGPQFITNSEEVRLRSFTTTIHKVNSMVAYKIPVND

SEQ ID NO: 613 - protein, 495 aa, Homo sapiens
MTEPEDVASEVYHGPELECTVGNLLPGTVYRFRVRALNDGGYGPYSDVSEITTAAGPPGQCKAPCISCTPDGCVLVGWESPDSSGADISEYRLEWGEDEESLELIYHGTDTRFEIRDLLPAAQYCCRLQAFNQAGAGPYSELVLCQTPASAPDPVSTLCVLEEEPLDAYPDSPSACLVLNWEEPCNNGSEILAYTIDLGDTSITVGNTTMHVMKDLLPETTYRIRIQAINEIGAGPFSQFIKAKTRPLPPLPPRLECAAAGPQSLKLKWGDSNSKTHAAEDIVYTLQLEDRNKRFISIYRGPSHTYKVQRLTEFTCYSFRIQAASEAGEGPFSETYTFSTTKSVPPTIKAPRVTQLEGNSCEILWETVPSMKGDPVNYILQVLVGRESEYKQVYKGEEATFQISGLQTNTDYRFRVCACRRCLDTSQELSGAFSPSAAFVLQRSEVMLTGDMGSLDDPKMKSMMPTDEQFAAIIVLGFATLSILFAFILQYFLMK

SEQ ID NO: 614 - protein, 212 aa, Homo sapiens [sequence omitted]

SEQ ID NO: 615 - protein, 503 aa, Homo sapiens
MPVPPPPAPPPPPTFALANTEKPTLNKTEQAGRNALLSDISKGKKLKKTVTNDRSAPILDKPKGAGAGGGGGGFGGGGGFGGGGGGGGGGSFGGGGPPGLGGLFQAGMPKLRSTANRDNDSGGSRPPLLPPGGRSTSAKPFSPPSGPGRFPVPSPGHRSGPPEPQRNRMPPPRPDVGSKPDSIPPPVPSTPRPIQSSLHNRGSPPVPGGPRQPSPGPTPPPFPGNRGTALGGGSIRQSPLSSSSPFSNRPPLPPTPSRALDDKPPPPPPPVGNRPSIHREAVPPPPPQNNKPPVPSTPRPSAPHRPHLRPPPPSRPGPPPLPPSSSGNDETPRLPQRNLSLSSSTPPLPSPGRSGPLPPPPSERPPPPVRDPPGRSGPLPPPPPVSRNGSTSRALPATPQLPSRSGVDSPRSGPRPPLPPDRPSAGAPPPPPPSTSIRNGFQDSPCEDEWESRFYFHPISDLPPPEPYVQTTKSYPSKLARNESRSGSNRRERGGPPLPPIPR

SEQ ID NO: 616 - protein, 510 aa, Homo sapiens
MAGSRQRGLRARVRPLFCALLLSLGRFVRGDGVGGDPAVALPHRRFEYKYSFKGPHLVQSDGTVPFWAHAGNAIPSSDQIRVAPSLKSQRGSVWTKTKAAFENWEVEVTFRVTGRGRIGADGLAIWYAENQGLEGPVFGSADLWNGVGIFFDSFDNDGKKNNPAIVIIGNNGQIHYDHQNDGASQALASCQRDFRNKPYPVRAKITYYQNTLTVMINNGFTPDKNDYEFCAKVENMIIPAQGHFGISAATGGLADDHDVLSFLTFQLTEPGKEPPTPDKEISEKEKEKYQEEFEHFQQELDKKKEEFQKGHPDLQGQPAEEIFESVGDRELRQVFEGQNRIHLEIKQLNRQLDMILDEQRRYVSSLTEEISKRGAGMPGQHGQITQQELDTVVKTQHEILRQVNEMKNSMSETVRLVSGMQHPGSAGGVYETTQHFIDIKEHLHIVKRDIDNLVQRNMPSNEKPKCPELPPFPSCLSTVHFIIFVVVQTVLFIGYIMYRSQQEAAAKKFF

SEQ ID NO: 617 - protein, 977 aa, Homo sapiens
MDIYDTQTLGVVVFGGFMVVSAIGIFLVSTFSMKETSYEEALANQRKEMAKTHHQKVEKKKKEKTVEKKGKTKKKEEKPNGKIPDHDPAPNVTVLLREPVRAPAVAVAPTPVQPPIIVAPVATVPAMPQEKLASSPKDKKKKEKKVAKVEPAVSSVVNSIQVLTSKAAILETAPKEGRNTDVAQSPEAPKQEAPAKKKSGSKKKGPPDADGPLYLPYKTLVSTVGSMVFNEGEAQRLIEILSEKAGIIQDTWHKATQKGDPVAILKRQLEEKEKLLATEQEDAAVAKSKLRELNKEMAAEKAKAAAGEAKVKKQLVAREQEITAVQARMQASYREHVKEVQQLQGKIRTLQEQLENGPNTQLARLQQENSILRDALNQATSQVESKQNAELAKLRQELSKVSKELVEKSEAVRQDEQQRKALEAKAAAFEKQVLQLQASHRESEEALQKRLDEVSRELCHTQSSHASLRADAEKAQEQQQQMAELHSKLQSSEAEVRSKCEELSGLHGQLQEARAENSQLTERIRSIEALLEAGQARDAQDVQASQAEADQQQTRLKELESQVSGLEKEAIELREAVEQQKVKNNDLREKNWKAMEALATAEQACKEKLHSLTQAKEESEKQLCLIEAQTMEALLALLPELSVLAQQNYTEWLQDLKEKGPTLLKHPPAPAEPSSDLASKLREAEETQSTLQAECDQYRSILAETEGMLRDLQKSVEEEEQVWRAKVGAAEEELQKSRVTVKHLEEIVEKLKGELESSDQVREHTSHLEAELEKHMAAASAECQNYAKEVAGLRQLLLESQSQLDAAKSEAQKQSDELALVRQQLSEMKSHVEDGDIAGAPASSPEAPPAEQDPVQLKTQLEWTEAILEDEQTQRQKLMAEFEEAQTSACRLQEELEKLRTAGPLESSETEEASQLKERLEKEKKLTSDLGRAATRLQELLKTTQEQLAREKDTVKKLQEQLEKAEDGSSSKEGTSV

SEQ ID NO: 618 - protein, 747 aa, Homo sapiens
MRRCNSGSGPPPSLLLLLLWLLAVPGANAAPRSALYSPSDPLTLLQADTVRGAVLGSRSAWAVEFFASWCGHCIAFAPTWKALAEDVKAWRPALYLAALDCAEETNSAVCRDFNIPGFPTVRFFKAFTKNGSGAVFPVAGADVQTLRERLIDALESHHDTWPPACPPLEPAKLEEIDGFFARNNEEYLALIFEKGGSYLGREVALDLSQHKGVAVRRVLNTEANVVRKFGVTDFPSCYLLFRNGSVSRVPVLMESRSFYTAYLQRLSGLTREAAQTTVAPTTANKIAPTVWKLADRSKIYMADLESALHYILRIEVGRFPVLEGQRLVALKKFVAVLAKYFPGRPLVQNFLHSVNEWLKRQKRNKIPYSFFKTALDDRKEGAVLAKKVNWIGCQGSEPHFRGFPCSLWVLFHFLTVQAARQNVDHSQEAAKAKEVLPAIRGYVHYFFGCRDCASHFEQMAAASMHRVGSPNAAVLWLWSSHNRVNARLAGAPSEDPQFPKVQWPPRELCSACHNERLDVPVWDVEATLNFLKAHFSPSNIILDFPAAGSAARRDVQNVAAAPELAMGALELESRNSTLDPGKPEMMKSPTNTTPHVPAEGPEASRPPKLHPGLRAAPGQEPPEHMAELQRNEQEQPLGQWHLSKRDTGAALLAESRAEKNRLWGPLEVRRVGRSSKQLVDIPEGQLEARAGRGRGQWLQVLGGGFSYLDISLCVGLYSLSFMGLLAMYTYFQAKIRALKGHAGHPAA

SEQ ID NO: 619 - protein, 188 aa, Homo sapiens
MSTMFADTLLIVFISVCTALLAEGITWVLVYRTDKYKRLKAEVEKQSKKLEKKKETITESAGRQQKKKIERQEEKLKNNNRDLSMVRMKSMFAIGFCFTALMGMFNSIFDGRVVAKLPFTPLSYIQGLSHRNLLGDDTTDCSFIFLYILCTMSIRQNIQKILGLAPSRAATKQAGGFLGPPPPSGKFS

SEQ ID NO: 620 - protein, 586 aa, Homo sapiens
MRPLPGALGVAAAALWLLLLLLPRTRADEHEHTYQDKEEVVLWMNTVGPYHNRQETYKYFSLPFCVGSKKSISHYHETLGEALQGVELEFSGLDIKFKDDVMPATYCEIDLDKEKRDAFVYAIKNHYWYQMYIDDLPIWGIVGEADENGEDYYLWTYKKLEIGFNGNRIVDVNLTSEGKVKLGSKYYNPDVIFSKMEKSDVKFEDRFDNILIVLFSHRIHWFSIFNSFMMVIFLVGLVSMILMRTLRKDYARYSKEEEMDDMDRDLGDEYGWKQVHGDVFRPSSHPLIFSSLIGSGCQIFAVSLIVIIVAMIEDLYTERGSMLSTAIFVYAATSPVNGYFGGSLYARQGGRRWIKQMFIGAFLIPAMGVHCLLHQFHSHLLPCFKSHSFWNNGGRLLHLFFCYSSSKSCWYNTWPKSVRSAQLSLSCQCCASSYTGEKMVHGAAVIVCLGGILPFGSIFIEMYFIFTSFWAYKIYYVYGFMMLVLVILCIVTVCVTIVCTYFLLNAEDYRWQWTSFLSAASTAIYVYMYSFYYYFFKTKMYGLFQTSFYFGYMAVFSTALGIMCGAIGYMGTSAFVRKIYTNVKID

SEQ ID NO: 621 - protein, 926 aa, Homo sapiens
MDMFPLTWVFLALYFSRHQVRGQPDPPCGGRLNSKDAGYITSPGYPQDYPSHQNCEWIVYAPEPNQKIVLNFNPHFEIEKHDCKYDFIEIRDGDSESADLLGKHCGNIAPPTIISSGSMLYIKFTSDYARQGAGFSLRYEIFKTGSEDCSKNFTSPNGTIESPGFPEKYPHNLDCTFTILAKPKMEIILQFLIFDLEHDPLQVGEGDCKYDWLDIWDGIPHVGPLIGKYCGTKTPSELRSSTGILSLTFHTDMAVAKDGFSARYYLVHQEPLENFQCNVPLGMESGRIANEQISASSTYSDGRWTPQQSRLHGDDNGWTPNLDSNKEYLQVDLRFLTMLTAIATQGAISRETQNGYYVKSYKLEVSTNGEDWMVYRHGKNHKVFQANNDATEVVLNKLHAPLLTRFVRIRPQTWHSGIALRLELFGCRVTDAPCSNMLGMLSGLIADSQISASSTQEYLWSPSAARLVSSRSGWFPRIPQAQPGEEWLQVDLGTPKTVKGVIIQGARGGDSITAVEARAFVRKFKVSYSLNGKDWEYIQDPRTQQPKLFEGNMHYDTPDIRRFDPIPAQYVRVYPERWSPAGIGMRLEVLGCDWTDSKPTVKTLGPTVKSEETTTPYPTEEEATECGENCSFEDDKDLQLPSGFNCNFDFLEEPCGWMYDHAKWLRTTWASSSSPNDRTFPDDRNFLRLQSDSQREGQYARLISPPVHLPRSPVCMEFQYQATGGRGVALQVVREASQESKLLWVIREDQGGEWKHGRIILPSYDMEYQIVFEGVIGKGRSGEIAIDDIRISTDVPLENCMEPISAFAVDIPEIHEREGYEDEIDDEYEVDWSNSSSATSGSGAPSTDKEKSWLYTLDPILITIIAMSSLGVLLGATCAGLLLYCTCSYSGLSSRSCTTLENYNFELYDGLKHKVKMNHQKCCSEA

SEQ ID NO: 622 - protein, 1659 aa, Homo sapiens [sequence omitted]

SEQ ID NO: 623 - protein, 371 aa, Homo sapiens
MSFRKVNIIILVLAVALFLLVLHHNFLSLSSLLRNEVTDSGIVGPQPIDFVPNALRHAVDGRQEEIPVVIAASEDRLGGAIAAINSIQHNTRSNVIFYIVTLNNTADHLRSWLNSDSLKSIRYKIVNFDPKLLEGKVKEDPDQGESMKPLTFARFYLPILVPSAKKAIYMDDDVIVQGDILALYNTALKPGHAAAFSEDCDSASTKVVIRGAGNQYNYIGYLDYKKERIRKLSMKASTCSFNPGVFVANLTEWKRQNITNQLEKWMKLNVEEGLYSRTLAGSITTPPLLIVFYQQHSTIDPMWNVRHLGSSAGKRYSPQFVKAAKLLHWNGHLKPWGRTASYTDVWEKWYIPDPTGKFNLIRRYTEISNIK

SEQ ID NO: 624 - protein, 510 aa, Homo sapiens; identical to SEQ ID NO: 616

SEQ ID NO: 625 - protein, 501 aa, Homo sapiens
NGAAPELPVPTGGPAVGAREQALAVSRNYLSQPRLTYKTVSGVNGPLVILDHVKFPRYAEIVHLTLPDGTKRSGQVLEVSGSKAVVQVFEGTSGIDAKKTSCEFTGDILRTPVSEDMLGRVFNGSGKPIDRGPVVLAEDFLDIMGQPINPQCRIYPEEMIQTGISAIDGMNSIARGQKIPIFSAAGLPHNEIAAQICRQAGLVKKSKDVVDYSEENFAIVFAAMGVNMETARFFKSDFEENGSMDNVCLFLNLANDPTIERIITPRLALTTAEFLAYQCEKHVLVILTDMSSYAEALREVSAAREEVPGRRGFPGYMYTDLATIYERAGRVEGRNGSITQIPILTMPNDDITHPIPDLTGYITEGQIYVDRQLHNRQIYPPINVLPSLSRLMKSAIGEGMTRKDHADVSNQLYACYAIGKDVQAMKAVVGEEALTSDDLLYLEFLQKFERNFIAQGPYENRTVFETLDIGWQLLRIFPKEMLKRIPQSTLSEFYPRDSAKH

SEQ ID NO: 626 - protein, 551 aa, Homo sapiens
MAENWKNCFEEELICPICLHVFVEPVQLPCKHNFCRGCIGEAWAKDSGLVRCPECNQAYNQKPGLEKNLKLTNIVEKFNALHVEKPPAALHCVFCRRGPPLPAQKVCLRCEAPCCQSHVQTHLQQPSTARGHLLVEADDVRAWSCPQHNAYRLYHCEAEQVAVCQYCCYYSGARQGHSVCDVEIRRNEIRKMLMKQQDRLEEREQDIEDQLYKLESDKRLVEEKVNQLKEEVRLQYEKLHQLLDEDLRQTVEVLDKAQAKFCSENAAQALHLGERMQEAKKLLGSLQLLFDKTEDVSFMKNTKSVKILMDRTQTCTSSSLSPTKIGHLNSKLFLNEVAKKEKQLRKMLEGPFSTPVPFLQSVPLYPCGVSSSGAEKRKHSTAFPEASFLETSSGPVGGQYGAAGTASGEGQSGQPLGPCSSTQHLVALPGGAQPVHSSPVFPPSQYPNGSAAQQPMLPQYGGRKILVCSVDNCYCSSVANHGGHQPYPRSGHFPWTVPSQEYSHPLPPTPSVPQSLPSLAVRDWLDASQQPGHQDFYRVYGQPSTKHYVTS

SEQ ID NO: 627 - protein, 124 aa, Homo sapiens
MSYIPGQPVTAVVQRVEIHKLRQGENLILGFSIGGGIDQDPSQNPFSEDKTDKGIYVTRVSEGGPAEIAGLQIGDKIMQVNGWDMTMVTHDQARKRLTKRSEEVVRLLVTRQSLQKAVQQSMLS

SEQ ID NO: 628 - protein, 406 aa, Homo sapiens
MGPSTPLLILFLLSWSGPLQGQQHHLVEYMERRLAALEERLAQCQDQSSRHAAELRDFKNKMLPLLEVAEKEREALRTEADTISGRVDRLEREVDYLETQNPALPCVEFDEKVTGGPGTKGKGRRNEKYDMVTDCGYTISQVRSMKILKRFGGPAGLWTKDPLGQTEKIYVLDGTQNDTAFVFPRLRDFTLAMAARKASRVRVPFPWVGTGQLVYGGFLYFARRPPGRPGGGGEMENTLQLIKFHLANRTVVDSSVFPAEGLIPPYGLTADTYIDLAADEEGLWAVYATREDDRHLCLAKLDPQTLDTEQQWDTPCPRENAEAAFVICGTLYVVYNTRPASRARIQCSFDASGTLTPERAALPYFPRRYGAHASLRYNPRERQLYAWDDGYQIVYKLEMRKKEEEV

SEQ ID NO: 629 - protein, 375 aa, Homo sapiens
MKVWLLLGLLLVHEALEDVTGQHLPKNKRPKEPGENRIKPTNKKVKPKIPKMKDRDSANSAPKTQSIMMQVLDKGRFQKPAATLSLLAGQTVELRCKGSRIGWSYPAYLDTFKDSRLSVKQNERYGQLTLVNSTSADTGEFSCWVQLCSGYICRKDEAKTGSTYIFFTEKGELFVPSPSYFDVVYLNPDRQAVVPCRVTVLSAKVTLHREFPAKEIPANGTDIVYDMKRGFVYLQPHSEHQGVVYCRAEAGGRSQISVKYQLLYVAVPSGPPSTTILASSNKVKSGDDISVLCTVLGEPDVEVEFTWIFPGQKDERPVTIQDTWRLIHRGLGHTTRISQSVITVEDFETIDAGYYICTAQNLQGQTTVATTVEFS

SEQ ID NO: 630 - protein, 1181 aa, Homo sapiens
MKLKEVDRTAMQAWSPAQNHPIYLATGTSAQQLDATFSTNASLEIFELDLSDPSLDMKSCATFSSSHRYHKLIWGPYKMDSKGDVSGVLIAGGENGNIILYDPSKIIAGDKEVVIAQNDKHTGPVRALDVNIFQTNLVASGANESEIYIWDLNNFATPMTPGAKTQPPEDISCIAWNRQVQHILASASPSGRATVWDLRENEPIIKVSDHSNRMHCSGLAWHPDVATQMVLASEDDRLPVIQMWDLRFASSPLRVLENHARGILAIAWSMADPELLLSCGKDAKILCSNPNTGEVLYELPTNTQWCFDIQWCPRNPAVLSAASFDGRISVYSIMGGSTDGLRQKQVDKLSSSFGNLDPFGTGQPLPPLQIPQQTAQHSIVLPLKKPPKWIRRPVGASFSFGGKLVTFENVRMPSHQGAEQQQQQHHVFISQVVTEKEFLSRSDQLQQAVQSQGFINYCQKKIDASQTEFEKNVWSFLKVNFEDDSRGKYLELLGYRKEDLGKKHIKEEKEESEFLPSSGGTFNISVSGDIDGLITQALLTGNFESAVDLCLHDNRMADAIILAIAGGQELLARTQKKYFAKSQSKITRLITAVVMKNWKEIVESCDLKNWREALAAVLTYAKPDEFSALCDLLGTRLENEGDSLLQTQACLCYICAGNVEKLVACWTKAQDGSHPLSLQDLIEKVVILRKAVQLTQAMDTSTVGVLLAAKMSQYANLLAAQGSIAAALAFLPDNTNQPNIMQLRDRLCRAQGEPVAGHESPKIPYEKQQLPKGRPGPVAGHHQMPRVQTQQYYPHGENPPPPGFIMHGNVNPNASGQLPTSPGHMHTQVPPYPQPQPYQPAQPYPFGTGGSAMYRPQQPVAPPTSNAYPNTPYISSASSYTGQSQLYAAQHQASSPTSSPATSFPPPPSSGASFQHGGPGAPPSSSAYALPPGTTGTLPAASELPASQRTGPQNGWNDPPALNRVPKKKKMPENFMPPVPITSPIMNPLGDPQSQMLQQQPSAPVPLSSQSSFPQPHLPGGQPFHGVQQPLGQTGMPPSFSKPNIEGAPGAPIGNTFQHVQSLPTKKITKKPIPDEHLILKTTFEDLIQRCLSSATDPQTKRKLDDASKRLEFLYDKLREQTLSPTITSGLHNIARSIETRNYSEGLTMHTHIVSTSNFSETSAFMPVLKVVLTQANKLGV

SEQ ID NO: 631 - protein, 303 aa, Homo sapiens; identical to SEQ ID NO: 609

SEQ ID NO: 632 - protein, 102 aa, Homo sapiens
MSSPPEGKLETKAGHPPAVKAGGMRIVQKHPHTGDTKEEKDKDDQEWESPSPPKPTVFISGVIARGDKDFPPAAAQVAHQKPHASMDKHPSPRTQHIQQPRK

SEQ ID NO: 633 - protein, 1217 aa, Homo sapiens
MFLYNLTLQRATGISFAIHGNFSGTKQQEIVVSRGKILELLRPDPNTGKVHTLLTVEVFGVIRSLMAFRLTGGTKDYIVVGSDSGRIVILEYQPSKNMFEKIHQETFGKSGCRRIVPGQFLAVDPKGRAVMISAIEKQKLVYILNRDAAARLTISSPLEAHKANTLVYHVVGVDVGFENPMFACLEMDYEEADNDPTGEAAANTQQTLTFYELDLGLNHVVRKYSEPLEEHGNFLITVPGGSDGPSGVLICSENYITYKNFGDQPDIRCPIPRRRNDLDDPERGMIFVCSATHKTKSMFFFLAQTEQGDIFKITLETDEDMVTEIRLKYFDTVPVAAAMCVLKTGFLFVASEFGNHYLYQIAHLGDDDEEPEFSSAMPLEEGDTFFFQPRPLKNLVLVDELDSLSPILFCQIADLANEDTPQLYVACGRGPRSSLRVLRHGLEVSEMAVSELPGNPNAVWTVRRHIEDEFDAYIIVSFVNATLVLSIGETVEEVTDSGFLGTTPTLSCSLLGDDALVQVYPDGIRHIRADKRVNEWKTPGKKTIVKCAVNQRQVVIALTGGELVYFEMDPSGQLNEYTERKEMSADVVCMSLANVPPGEQRSRFLAVGLVDNTVRIISLDPSDCLQPLSMQALPAQPESLCIVEMGGTEKQDELGERGSIGFLYLNIGLQNGVLLRTVLDPVTGDLSDTRTRYLGSRPVKLFRVRMQGQEAVLAMSSRSWLSYSYQSRFHLTPLSYETLEFASGFASEQCPEGIVAISTNTLRILALEKLGAVFNQVAFPLQYTPRKFVIHPESNNLIIIETDHNAYTEATKAQRKQQMAEEMVEAAGEDERELAAEMAAAFLNENLPESIFGAPKAGNGQWASVIRVMNPIQGNTLDLVQLEQNEAAFSVAVCRFSNTGEDWYVLVGVAKDLILNPRSVAGGFVYTYKLVNNGEKLEFLHKTPVEEVPAAIAPFQGRVLIGVGKLLRVYDLGKKKLLRKCENKHIANYISGIQTIGHRVIVSDVQESFIWVRYKRNENQLIIFADDTYPRWVTTASLLDYDTVAGADKFGNICVVRLPPNTNDEVDEDPTGNKALWDRGLLNGASQKAEVIMNYHVGETVLSLQKTTLIPGGSESLVYTTLSGGIGILVPFTSHEDHDFFQHVEMHLRSEHPPLCGRDHLSFRSYYFPVKNVIDGDLCEQFNSMEPNKQKNVSEELDRTPPEVSKKLEDIRTRYAF

SEQ ID NO: 634 - DNA, 2453 bp, Homo sapiens
tctgttatgaggagggaccatccagctacatccccttctgcactcatctggtatcttacctccccagagctccttatccaaccctgaagttccctatctggctggagaccctctttcacaaagatccctttctcaagctgaccagtgatttttacacacgtatcacagggagaatcagtaatccaagcgagttacaggtcgtagcagattcactctcccttgatcccggccacctgcagacaccatgcatgtgttacctacagtgcttcaaggtgtggtattctgatagctttggacagttattccccacctgcccaccaccaataaaacttctcaacaagcttacagcaagtgagaaataataactaaatgcaatgccgttgtgctgactacaagcaaatgtgaaccccacagcctgctaacaaagcctaaggagctatggaaacagggagggcatttggcagcctgtgaattttgaaaaagatttcaggacatctctagtaatcattaacattttagctacaatgtgaggtcgaagtgctggctcagaatgtggcgctgcagcctccaagaatcttgcaacggcagcagtccgggatcatgttcggcctctgatttcctgctagatttactggttctggccacagcagagtatctttatctctctaaccatttttatgtaaaataagattgtttggagccctttcagggccacgccttagaattgctctgagagtaccaagtgcctgatttcttagagtccttaccagtaggagatgttggctgttgatttagctgctgagtcatggggctggggatagtggttttcagtagccaaaaacgttagtgtgttgctggtgaaatcacaaactctgcttgcaaaattttactctttttttttttttcttttttgctgaatttaatcctaaagttcttgcttcttactcactggaaagcaaatactatggtctcaataggccttaatttttaaccaacgccatggaaacctgtctgtagctaagaggataaaaatgctaggggttaaggaagaaaagcaggttttgcagctgaccagaagaaataattaaattcaagtacatatttgaacacctctttacaaggaaatgaggaaaatcagatgttttagttctcttacagaccagcagtaatgttgaaaaatataaaagtagccgtaacagaaaacgaagtgatcatttcagccctcccttggagtggggggatatattgcggagctgagttttaatggctatcagttcttgatcagaaaagtgaaatcactccaactccttccgtattccacggaatatgacccgtcttgaactttgagaaattccccgggtctgtgtgaaattccagttccaaataattcacatgaatggttcacaagaatccaggtaggtttgatctagttccctagatgggaatgagagggatgtaaaatttgagaggcaacatgacatggactagagagagaatgaattaacactggggaagcacgtgggggcgcgccggacacctagaaggcactcaaaaagtatgaggtagaattaaaggaaagtgaaccttcctttggctgtctcggcctgattctcaccgcagcaaggagaaagggacagggtcaccttggcgggtgccaggcggagcccggccagacgggcgcggctggagggcagcgcgcaggcgcaggcggcgcacgtggccccggacacgcagcgctgcggcggggtcagcgccccaaccccggagtggggccgaggcgcgcagcctctcaacgactcgacgccaacggggtctctcggatcgcggcgcgaggcaggaggggcggggcaggagggccgcggcaggcccgggccgccaaagttgtcagcaaggtcgagggccggacgtggggccccagagcgacgctgagtgcgtgcgggactcggagtacgtgacggagccccgagctctcatgcccgccacgccgccccgggccatcccccggagccccggctccgcacaccccagttcggctcaccggtcctatctggggccagagtttcgcccgcaccactacagggccgctggggagtcggggccccccagatctgcccgcctcaagtccgcgggacgtcacccccctttccacgctactgcagccgtcgcagtcccacccctttccgggaggtgagggaatgagtgacggctctcccgacgaatggcgaggcggagctgagggggcgtgccccggaggcgggaagtgggtggggctcgccttagctaggcaggaagtcggcgcgggcggcgcggacagtatctgtgggtacccggagcacggagatctcgccggctttacgttcacctcggtgtctgcagcaccctccgcttcctctcctaggcgacgagacccagtggctaggtaatgattggggaagggctgagcaacgggcagg

SEQ ID NO: 635 - DNA, 1603 bp, Homo sapiens
  misc_feature 15, 1478, 1489, 1494, 1520, 1543, 1560, 1573: n = A,T,C or G
tgaaagatgggggcntgggaggatgaggttctggaggatgaggttctggaggagcaggggcctggaggatgagggcctggaggacaagagcctggaggacaggggcctgaaagatgggggcctggaggatggggcctggaggatgggggcctggaggacgggggcctggaggatgatggcctgaaggatgaaacctggaggatggagcctggaggatggagcctggaggatgagggcctagaggatgggggcctggaggacaggggcctagaggatggagccctggagaatgggggcctggaggatggagcctgggggacgagggcctggaggatgggggcctggagtatggggcctggctctccagaccctgaggacagccccgtggtggaccaaggattttgggtttcctgcgtctctgggcccctgactgctcaaccatcagaaacagactggcaaccccctgtcatttccctggcgtggggaacttcgggtcccctctgtccttcccaccacacttttccctctttctttccgggtgtctactctctggcttctgtcttctctgtcaggtccacagaatccttctccagcacatcctaccccaggaaggccatgggctgggtcccaggtgccatctttcagaagatgtagagcattcccatggaacaaaaataacccatttcaggggttggctgaaaatgaacttattaaaacctgcctgtcacaggctactccgctgaccctgtcagcctcatctccatggagagcagcccctcctgctgaagatgggacaaagggcatcgtgctgcggttggggaggctctaaccacagccctgggagcagtctcttacctcctctgagatgcttcccttcctcagggaggggacttttccatgctatctgctggcctgtacattttccccagtaaacttggccctaatattttctaaattcctgtggtccctgcccactctatcaatagaaatgcatagcttatcccttcctgggtgtgaccctgtgtgtgcccagccccagacctgcacgtggccggttttccacgctggcagcctggcatgacccaactctctgtccagggcaggaagaggtatcaccgagcagggagagagtcaccctggcccggaagcctcgcctgcacagggcacagctgcctcttgcctcctcttcgcctccacggtggaagggctggggccacggggcagagaagaaaggttatctctgcttgttggacaaacagaggggagattataaaacatacccggcagtggacaccatgcattctgcaagccaccctggggtgcagctgagctagacatgggacggcgagacgcccagctcctggcagcgctcctcgtcctggggctatgtgccctggcggggagtgagaaaccctgtaagtgaaggagagggtctttttatgtgctttctttatttctcttaaagaaaaaaaaaaagnacaaccataanttaanttgagagggggaatggttataaaggnatctggaaatgtgtgttgtccanatgggattggccactgntcaggagggtggntccaagaagggcctccctcctagggaaagg

SEQ ID NO: 636 - DNA, 481 bp, Homo sapiens; identical to SEQ ID NO: 2

SEQ ID NO: 637 - DNA, 1053 bp, Homo sapiens
gggggagtgggggagagagaggagaccaggacagctgctgagacctctaagaagtccagatactaagagcaaagatgtttcaaactgggggcctcattgtcttctacgggctgttagcccagaccatggcccagtttggaggcctgcccgtgcccctggaccagaccctgcccttgaatgtgaatccagccctgcccttgagtcccacaggtcttgcaggaagcttgacaaatgccctcagcaatggcctgctgtctgggggcctgttgggcattctggaaaaccttccgctcctggacatcctgaagcctggaggaggtacttctggtggcctccttgggggactgcttggaaaagtgacgtcagtgattcctggcctgaacaacatcattgacataaaggtcactgacccccagctgctggaacttggccttgtgcagagccctgatggccaccgtctctatgtcaccatccctctcggcataaagctccaagtgaatacgcccctggtcggtgcaagtctgttgaggctggctgtgaagctggacatcactgcagaaatcttagctgtgagagataagcaggagaggatccacctggtccttggtgactgcacccattcccctggaagcctgcaaatttctctgcttgatggacttggccccctccccattcaaggtcttctggacagcctcacagggatcttgaataaagtcctgcctgagttggttcagggcaacgtgtgccctctggtcaatgaggttctcagaggcttggacatcaccctggtgcatgacattgttaacatgctgatccacggactacagtttgtcatcaaggtctaagccttccaggaaggggctggcctctgctgagctgcttcccagtgctcacagatggctggcccatgtgctggaagatgacacagttgccttctctccgaggaacctgccccctctcctttcccaccaggcgtgtgtaacatcccatgtgcctcacctaataaaatggctcttcttctgcgaaaaaaaaaaaaaaaaaaaaaaaaaaaaa

SEQ ID NO: 638 - DNA, 2407 bp, Homo sapiens
ggcacgaggcggagggggctcagtccgcagccgccgccgccaccgccgcgcctcggcctcggtgcaggcagcggccgccgccgccgagacagctgcgcgggcgagcatccccacgcagcaccttggaagttgttttcaaccatatccagcctttgccgaatacatcctatctgccacacatccagcgtgaggtccctccagctacaaggtgggcaccatggcggagaagtttgactgccactactgcagggatcccttgcaggggaagaagtatgtgcaaaaggatggccaccactgctgcctgaaatgctttgacaagttctgtgccaacacctgtgtggaatgccgcaagcccatcggtgcggactccaaggaggtgcactataagaaccgcttctggcatgacacctgcttccgctgtgccaagtgccttcaccccttggccaatgagacctttgtggccaaggacaacaagatcctgtgcaacaagtgcaccactcgggaggactcccccaagtgcaaggggtgcttcaaggccattgtggcaggagatcaaaacgtggagtacaaggggaccgtctggcacaaagactgcttcacctgtagtaactgcaagcaagtcatcgggactggaagcttcttccctaaaggggaggacttctactgcgtgacttgccatgagaccaagtttgccaagcattgcgtgaagtgcaacaaggccatcacatctggaggaatcacttaccaggatcagccctggcatgccgattgctttgtgtgtgttacctgctctaagaagctggctgggcagcgtttcaccgctgtggaggaccagtattactgcgtggattgctacaagaactttgtggccaagaagtgtgctggatgcaagaaccccatcactgggtttggtaaaggctccagtgtggtggcctatgaaggacaatcctggcacgactactgcttccactgcaaaaaatgctccgtgaatctggccaacaagcgctttgttttccaccaggagcaagtgtattgtcccgactgtgccaaaaagctgtaaactgacaggggctcctgtcctgtaaaatggcatttgaatctcgttctttgtgtccttactttctgccctataccatcaataggggaagagtggtccttcccttctttaaagttctccttccgtcttttctcccattttacagtattactcaaataagggcacacagtgatcatattagcatttagcaaaaagcaaccctgcagcaaagtgaatttctgtccggctgcaatttaaaaatgaaaacttaggtagattgactcttctgcatgtttctcatagagcagaaaagtgctaatcatttagccacttagtgatgtaagcaagaagcataggagataaaacccccactgagatgcctctcatgcctcagctgggacccaccgtgtagacacacgacatgcaagagttgcagcggctgctccaactcactgctcaccctcttctgtgagcaggaaaagaaccctactgacatgcatggtttaacttcctcatcagaactctgcccttccttctgttcttttgtgctttcaaataactaacacgaacttccagaaaattaacatttgaacttagctgtaattctaaactgacctttccccgtactaacgtttggtttccccgtgtggcatgttttctgagcgttcctactttaaagcatggaacatgcaggtgatttgggaagtgtagaaagacctgagaaaacgagcctgtttcagaggaacatcgtcacaacgaatacttctggaagcttaacaaaactaaccctgctgtcctttttattgtttttaattaatatttttgttttaattgatagcaaaatagtttatgggtttggaaacttgcatgaaaatattttagccccctcagatgttcctgcagtgctgaaattcatcctacggaagtaaccgcaaaactctagagggggagttgagcaggcgccagggctgtcatcaacatggatatgacatttcacaacagtgactagttgaatcccttgtaacgtagtagttgtctgctctttgtccatgtgttaatgaggactgcaaagtcccttctgttgtgattcctaggacttttcctcaagaggaaatctggatttccacctaccgcttacctgaaatgcaggatcacctacttactgtattctacattattatatgacatagtataatgagacaatatcaaaagtaaacatgtaatgacaatacatactaacattcttgtaggagtggttagagaagctgatgcctcatttctacattctgtcattagctattatcatctaacgtttcagtgtatccttacagaaataaagcagcatatgaaaaaaaaaaaaaaaaaaaaaaa

SEQ ID NO: 639 - DNA, 2362 bp, Homo sapiens
ggaattccaaaaaaaaaaaatacgactacacctgctccggagcccgcggcggtacctgcagcggaggagctctgtcttccccttcatctcacgcgagcccggcgtcccgccgcgtgcgccccggcgcagcccgccagtccgcccggagcccgcccagtcgccgcgctgcacgcccggggtgaaccctctgccctcgctgggacagagggccccgcagccgtcatgctttccgccatctacacagtcctggcgggactgctgttcctgccgctcctggtgaacctctgctgcccatacttcttccaggacataggctacttcttgaaggtggccgccgtgggccggagggtgcgcagctacgggcagcggcggccggcgcgcaccatcctgcgggcgttcctggagaaagcgcgccagacgccacacaagccttttctgctcttccgcgacgagactctcacctacgcgcaggtggaccggcgcagcaatcaagtggcccgggcgctgcacgaccacctcggcctgcgccagggagactgcgtggcgctccttatgggtaacgagccggcctacgtgtggctgtggctggggctggtgaagctgggctgtgccatggcgtgcctcaattacaacatccgcgcgaagtccctgctgcactgcttccagtgctgcggggcgaaggtgctgctggtgtcgccagaactacaagcagctgtcgaagagatactgccaagccttaaaaaagatgatgtgtccatctattatgtgagcagaacttctaacacagatgggattgactctttcctggacaaagtggatgaagtatcaactgaacctatcccagagtcatggaggtctgaagtcactttttccactcctgccttatacatttatacttctggaaccacaggtcttccaaaagcagccatgatcactcatcagcgcatatggtatggaactggcctcacttttgtaagcggattgaaggcagatgatgtcatctatatcactctgcccttttaccacagtgctgcactactgattggcattcacggatgtattgtggctggtgctactcttgccttgcggactaaattttcagccagccagttttgggatgactgcagaaaatacaacgtcactgtcattcagtatatcggtgaactgcttcggtatttatgcaactcaccacagaaaccaaatgaccgtgatcataaagtgagactggcactgggaaatggcttacgaggagatgtgtggagacaatttgtcaagagatttggggacatatgcatctatgagttctatgctgccactgaaggcaatattggatttatgaattatgcgagaaaagttggtgctgttggaagagtaaactacctacagaaaaaaatcataacttatgacctgattaaatatgatgtggagaaagatgaacctgtccgagatgaaaatggatattgcgtcagagttcccaaaggtgaagttggacttctggtttgcaaaatcacacaacttacaccatttaatggctatgctggagcaaaggctcagacagagaagaaaaaactgagagatgtctttaagaaaggagacctctatttcaacagtggagatctcttaatggttgaccatgaaaatttcatctatttccacgacagagttggagatacattccggtggaaaggggaaaatgtggccaccactgaagttgctgatacagttggactggttgattttgtccaagaagtaaatgtttatggagtgcatgtgccagatcatgagggtcgcattggcatggcctccatcaaaatgaaagaaaaccatgaatttgatggaaagaaactctttcagcacattgctgattacctacctagttatgcaaggccccggtttctaagaatacaggacaccattgagatcactggaacttttaaacaccgcaaaatgaccctggtggaggagggctttaaccctgctgtcatcaaagatgccttgtatttcttggatgacacagcaaaaatgtatgtgcctatgactgaggacatctataatgccataagtgctaaaaccctgaaactctgaatattcccaggaggataactcaacatttccagaaagaaactgaatggacagccacttgatataatccaactttaatttgattgaagattgtgaggaaattttgtaggaaatttgcatacccgtaaagggagacttttttaaataacagttgagtctttgcaagtaaaaagatttagagattattatttttcagtgtgcacctactgtttgtatttgcaaactgagcttgttggagggaaggcattattttttaaaatacttagtaaattaaatgaac

SEQ ID NO: 640 - DNA, 4070 bp, Homo sapiens; identical to SEQ ID NO: 6

SEQ ID NO: 641 - DNA, 2436 bp, Homo sapiens; identical to SEQ ID NO: 7

SEQ ID NO: 642 - DNA, 3768 bp, Homo sapiens
cctctgacccttttggtcgctaggagtcagccgactcagtacacaggactcactgaatggagacacaaggctcctccagggagtggcggctcatggcaatcctagaatggtcaccagccaggctttagagacccacacagagggcgttctgacccaaagttgcactggggaactccaagtttggggattctttgaatttaactctttttctagctacatttcctattatttgtccaattcttaccaaacatctctgttcacattctgaagctgggatctgactggcagagctagtagatgctgactattcagatggagccctgacattggctttctcagcttggctgtgactggcagcaggtttgcgggagaactgtgtgtcccagaacatgactggctacacctgcacctcagcaagattggggcagggcagttatcttcaaaaagctgtgtaggtggggcagtcattactgacaaatccagtgcagacccaggatggcccaaacactggcttatcctttctgaatctcatctcccacagctgtaaagcggggtggtgctcgctacctcacagaggtgttgtaaagattagatgtaatcttgccaagcagccactttgtaaactgtatagtcttatgcagatggaaggaagggcctgtgcctaccttgatcatagcactaaacaaactgtactgtattttcattcctcttagttatctccctaaaaagactctgagttccttgaacacaggaaggtgttttatttgattttgttatcctcagcatgtagcagtgtctgacacacagtaggtgctctatcactgtgagagggatggatggatgggtggagttacagatggatagaaggatagatggagggatgggtggatgatggatggatagatggatggaggggggatgatgaatggagggataatgagtggatgaatgagggaatgggtggatggatggatggagggatggaggaacagatagatagatggagggatgggtgggtgatggatggatagatggatggagggagggatgatgaatggagggataatgaatggatgaatgaggggatgggtggatggatgaatggagggatgatgggtggatgaatgaattgagggatggatggatgaacacatggatggatggatagatggatagatggaggaactggtggattttggatggatgggtggatggatagatgaatgaatgcctggatagacaaagagatgatggatagatgaatagatgaattaagggatgtcggatagatggagggattgatagatgttggatggatgggtggtggatggatagatgagtgaatgcatggatagacaaagagatgatggatggatgaattaagggatgacagatggatggatggatgagtaactggatggacaagtggataaatggatagatggttgaatacctgaatggattgaaggaggatgcatggatgtaagataaggctaatcatcctccactctctttctttgcaaaaccatccacccatttactcaataaacatttattcagttcaaacttggcacaaagcaccatgtgaggcccaagagatacgtgggttaataaaacagagctcctgccctcctgaaaactgcaaagaaaggggcgtggcttcctgagttcaaatcccaactctgccagcgactagctgtacatcagtgatgtttccctactttctctcaattaaatagggataatgtcagtacctatcacattgggaggtcttgcggggattaaatgagttaccaaatgccaagtgtttgggacagggcctggcacccagcaaagtctcttgtgagtgctggctgctattatcctaatggagaagatggcatgaaaaccaggaaataggatgccctttgggaagcaatgcaacaggaacttacacaaagaaaggaaaggaggaagcaattagtggtgtctcaaaggagtatgtcaagaaaaacttttcagagggaaacctttgagcagggccatgaaaacaggagttctctaagagattgtggacttgcctgggaccacctggctataagcacaaaaccatccggttcctttctgtcacttctggcgggtgaggggtctctggcaaaggggcagaaggtgcgtgagaggttgcgaatggcaggactgtcctggccagccggggcacctggtggccaagcttagaaacatgacaggtcctcttgggagggctgaccgcagggagcgttgggtttcaggctgctggcgtcggcttctgtggtgccctttctgtcggctatgagagtccagacagtgcccaacctcctccccttctttccacacgcacaaccaccccaccccctgtggcctgagctgtcctgcctcgccacaatggcacctgccctaaaatagcttcccatgtgagggctagagaaaggaaaagattagaccctccctggatgagagagagaaagtgaaggagggcaggggagggggacagcgagccattgagcgatctttgtcaagcatcccagaaggtataaaaacgcccttgggaccaggcagcctcaaaccccagctgttggggccaggacacccagtgagcccatacttgctctttttgtcttcttcagactgcgccatggggctcagcgacggggaatggcagttggtgctgaacgtctgggggaaggtggaggctgacatcccaggccatgggcaggaagtcctcatcaggtaaaaggaagagattccattgcccctgccacccacaccctaagatcaagggtgttcagctgcaaggtggaaagtttgcacgtggggtaggtcagttggctgcattagttaagggtgttagaacggtcacttgctttttctttgcttttaagtgtcagggattggactcaggagagggaaaggagccatttcaggctgatatcagcagctggaggaagcatgagaatcaaacctaggatgctcagagtccaccaggaagaattttagaattatagacagtcagagttaacaagggtcctgagagattttgtacagccacctctcttacaggatgaggacaaaaagcgactgagaaggggaggacatttccagagtcacagctcattaaatgctcttaaagtgtcaaggttaagacatgctcttcaaggggagacagatctggttctagacttggctctgccactgagccactgggtgacctttgggaaggtactcaacctctcggagcctcaatttcctctcctgtacagtgaggggatatcctaatatctatatcctagaggagatgtgagaattaaataaaataatgcatgcaagaggcctggcatggttcctggcatatactgagtcctagaaatgttagtagctattactgatgaagcccaggctagggacctttcaaagcattgcaattagagaacagaagatagaggctcattagtgaccttcgatgttgagtatgtctctagtttgagaggtctgaatgatgtggtctgcaagtatatcctgccttctaccacaagggattccagaatacaccaaagaaaacaaaattctgaggtttgtaaatagagggtggctgtggtttgtacatagaagctcatctcctcgttgccttctatcccaaaggtgatacactcttctcttggccccttccctcaccattctgagctggttccctcagaagtctaataggttaagaatcaacgtttctgccaacgggaggaaggaagtgggcgccgg

SEQ ID NO: 643 - DNA, 2218 bp, Homo sapiens; identical to SEQ ID NO: 9

SEQ ID NO: 644 - DNA, 1398 bp, Homo sapiens
gtagtaaaggccatggccatgcagaaaatctttgcccgggaaatcttggactccaggggcaaccccacggtggaggtggacctgcacacggccaagggccgattccgagcagctgtgcccagtggggcttccacgggtatctatgaggctctggaactaagagacggagacaaaggccgctacctggggaaaggagtcctgaaggctgtggagaacatcaacaatactctgggccctgctctgctgcaaaagaaactaagcgttgcggatcaagaaaaagttgacaaatttatgattgagctagatgggaccgagaataagtccaagtttggggccaatgccatcctgggcgtgtccttggccgtgtgtaaggcgggagcagctgagaagggggtccccctgtaccgccacatcgcagatctcgctgggaaccctgacctcatactcccagtgccagccttcaatgtgatcaacgggggctcccatgctggaaacaagctggccatgcaggagttcatgattctgcctgtgggagccagctccttcaaggaagccatgcgcattggcgccgaggtctaccaccacctcaagggggtcatcaaggccaagtatgggaaggatgccaccaatgtgggtgatgaaggtggcttcgcacccaacatcctggagaacaatgaggccctggagctgctgaagacggccatccaggcggctggttacccagacaaggtggtgatcggcatggatgtggcagcatctgagttctatcgcaatgggaagtacgatcttgacttcaagtcgcctgatgatcccgcacggcacatcactggggagaagctcggagagctgtataagagctttatcaagaactatcctgtggtctccatcgaagacccctttgaccaggatgactgggccacttggacctccttcctctcgggggtgaacatccagattgtgggggatgacttgacagtcaccaaccccaagaggattgcccaggccgttgagaagaaggcctgcaactgtctgctgctgaaggtcaaccagatcggctcggtgaccgaatcgatccaggcgtgcaaactggctcagtctaatggctggggggtgatggtgagccaccgctctggggagactgaggacacattcattgctgaccttgtggtggggctctgcacaggacagatcaagactggcgccccctgccgctcggagcgtctggccaaatacaaccaactcatgaggatcgaggaggctcttggggacaaggcaatctttgctggacgcaagttccgtaacccgaaggccaagtgagaagctggaggctccaggactccactggacagacccaggtcttccagacctgcttcctgaaataaacactggtgccaacca

SEQ ID NO: 645 - DNA, 2805 bp, Homo sapiens; identical to SEQ ID NO: 13

SEQ ID NO: 646 - DNA, 57038 bp, Homo sapiens
gatccacaggatcgggaggggaggagtcaggagacactgccgaagaatgggacttggagttggggaaatgcggtgacctcccccagttcccctgcctgctgccctcctttgttgggcatctggtcgaccctcttgcccccacctgccctagatccttgaaatattttcctcagacttctagaccccacatacctcccacctgtccttcagtgattgatgctcaccccctgcctccagagaaaacagaatcgccacctgcccacgctgcttccaccctccctgccttctccacacccactccggtaatgattccatcttcaggctccatctcaacaggatctttcccacacggatggatcaatcataagtcaatctgtcttctttaaagaaaatccttaacccaacctcaccttggcctcattacctccagaccacccgctaatgatggctgcttcccccctcccaggcattccaccacctgccccagctctgccccctacccctgccccacacacacccgccaccctaggaggtaggtgatgtgaccaccccattgaaagggtagggacgtcgggaaaatatggttgggcacagtggaactagagtttgttccctgtccatccgactccacgagggagaataaaatacgtgtcaagtgctcagaacagcgcctgcggtcaagcactcagtaggtgatatatactgataacataatctgggtggttttaagagcctgcgctccagcccggacacccaccccacccagcccaaggcaccttcctgagcacaggtctgcctgtcccttccccagctcaaaatctttggctctggatggtccaggacactgagcaccaaaatggccttctgtgatctggccctcctgggactctccaaattcattcccccctgctcccctccctgtagatggagaccttccaggcaggtcagacaaactgctgcccccaagtgtagccactgcatctttttcttttttcttttctttctttttttttttctttttcttttttttctctttttttgagacggagtctcactctttgcccaggccggagtggtgcagtggtgtgatcttggctcaccacaacctctacctccggggttcaagcgattctcccgtctcagccccctaagtagctgggattacaggcgccgccaccacgcctggctaattttttgtatttttagtagagacggggtttcaccatgttggcaaggctggtctcaaactcctgacctcaggtgagccgcccgcctcggcctcccaaagccaccgcatcttggtccctgccattcccttagcctggggtgccggctcatcttttccctctaggatttctttagactcagcatatcttgcaaatgtccactaggtggtgctcactcatcgccagcagggagctaacaagccgctcctggggttgggagggcggaggtgccccacagcggggctgacagcctcagcggtcctcttcagcctccagggagccaaccacaggcctgcgtgactctccctgtcatctgcaccctctctggggtcctctgcccatccagccacccgcacagatctgtgtcagtccctgccccccaacactgatcccctcctcccagccctaccccagcctggcactcactggttcttctccagctcaagcaggagctcctggccttcagcctccagggccaccagccccatgtctggcttcgagacctgggcaagaaaatgtgtggagctgagatggtggcctccaggcctcctgcctgccagggagtaggtggcctgtggagccggctggggaggaagttcttggggagaacgtgggctggggagtcagcaggaccccccacatactatggagggcgtggaggaggtgagaacatacaaagatgttcccaaactcaggatgtttgcagtcctgacaacagccacttggaagggcgttggcacagcctgccaggcacaccagcatcctccctagagaccagaggtcccagaaaggtgcccctcccctggcccgccctcttctttcatgcccagaaggggcatcaaaagcaggggaagacagaggggtgctgaggacattatgggggcatcgggtagccatggtcagggcctcctcagagcctctgctacctgaggcttgtttccaaatgagctgctgctcattccctatagaattcaaatttgactcctccacttccaattttggcaaactgctccctcttccaaagttttcctgggcctccagcagcccccgtccctccggctccgacacctgcttcactggacccacgaagtaaacatggacgccattccagccaagagagcacactggctctcagctaggtgtcaggaggctggcttggacggccagccctctctccttcccccaccctcttggcgtctcccaccctgtgggaacaccccacttcccccttgtccactcagcctggctgggggcccagagttggagccggcccaggagcttcctgggaggctgctgcgccttcggaatgtttaacccccgactccttttctccaaaaatgcactggcctggggccctgtccaagggtctcagagtctttggagggagttcttccttcgcaagtggggagcagatggtccttgcctccctggccacaggccccacaaggcctccagcatgagctcatgaggctggaatgccacttgctttattggggaaaggtctgcaccgggaaaaaggccatactcgaggtccctgttcctctgcagcccctgctatctttactcttgccctcctggtaccctgccccttgatatatacccctcatcttgaaatgtgagtgtttcctgccttttggaggggacacctagcctctactctttcttctgtaccatcttggcaggcttcctgggggcaggggcccaccggtgggggaagcagagcccctttggggctctcctcttggtcacagcccaggccagacagacagggaggcccagaggcagagtgaccccagtgtgtgtccagccttcccctcctggggatggggagggcaatctcaaagctcaggccagtgccgtgcttgaccagtggaatgggggccttatgggcctaggggatcccagtgagggccctgggttgggagctgctgggtctctgggggcctctcagccttcatggcaatgctcccctgccttccctcttgctggatttggacagtagggctgaaaattccaaacaaagagggctctctaggaggggcaggggtgtagccaatggtttaaaatcgttcagaccttagtgggtctcaggctcccagcctaaagagctgtgtgaccatggacaatttccccaagctctctgggcttccgtttgcccctctgtaaaatgagcatatcaaggctactgccctcttagtttgcagcacagatattatggcacaaacagatggggcatggttattctggaagcgtgtgaagagcgggattgggaagaggctggggcagagcgtcctgcagaagaagcacatggggtggtcttacatctgggggacatcaggagagtgaccactgcccccccgataccagaagtggattccacaggagccagtgaggctgaaggttcaggccttcgtggcagggccctgagagggacagcagtgtgtccacagggtcacatgttctggtcaactttgcaaaaggttttctttttggtgcttttttttttttttttttagaggctcctgaaaagcttcaggacccacaaactctggacccatttctgcctggtgggggtgggggtggcccagatcatccagggagggagggaaagagggaggtggggtggagaaagctgaaatgacttccatgtgtgcgggctcacgagatccagatgtccaaaccccagtgccttcttctgcccacttgaggggcaggggaggcaggggcctataggagtagtgacttggtggttctggggaccccagcaaaactagaagctgtaatgtagggagagacaaaagggctgggaggttcagggcccctgtggagggcggggagacatggcactgaccggctcctccaggctgacggtgcgccagggttgtccatccaggacccagtgcggggtgactggctgcccagggatatgtcctggagtaaagacagagcacagggtgagggggacctgaggaacacaggggcatgggacaaagcagagggaggggggtagaggacatccccagggaggcactggaggccttttggggcagacttcaccttcaacacgcgtgggctcagcctggagaaggagggacgcccgtgggcatccttggatctgaggagctatcaaggaggaggaaaagagaaggctggaaagggacagctcagctggggacacgggagtcccctgacctttgtcggggggcaggcttgggctcggcgatcacaaggaagaggccaaggccgccagtgcagaggggaaggaaagagcgcggcagccttagggatttttagatgggcagcagatgcctttagggtgagagatgtacgaagagaggacacttgtgccccccccatcatctgagaaaaacaacagccagatgttgccttgcgaggtccaccttgcccagagctccctcggggactctgtcctggtggcagggttttggtaccctggcccagaaggcccctcctcatctcttcaaggggaggggacgcttctggacggagccttggtgctccctggccgggtgtgcctaagggggctctaggaggaatcccagagccaagcattactcagagggcgcctggaatgttcccctggaatgctcccagccctccactggccccaaccactctcacaggcccgccctgcaggagccaggccccaggcacccagagcctgcagcagccctccttcccccggtacccagtcccagctcccagaacagacagcctcccccctccacgcagccctggcctcagtcctgctgggctgatggctgcctgtggaagtgactcagctcctgctaggccaccccaactccttttttctcctccaccttctctcccagactacaaacatcaaagacccttcctccaagaagccctccttgattggatgagtgaattgccatcaggcagatgagggccgagaggagtctgccaccttggaaaggaggctagaggggccagtgcagggagggctctgagtggatgtgggggaggggaaggaggggaggtctctcagcccagagagcacttaactgagagtagagaaccaagctttgctgctcctaggcctctaagggtttggggaagaggtagggtgggcccgggcacaggtgtggtgtgggtgcagtgtggtgtgtgggtgctgtccacatggccttgcgcgcacgtgctggccacgggcaccctgaccccaatgagggagagaggggcagagctggagctggagctggagctccggtgaccgggtgaatgggggtggaacccgagggagccaggctggtattgggcacatagacgcccctctcccaggggtcccatcacctcccctgaccccaggatagggctcagaggggagggagcagtggaccgcctggggccctcccctggggccagaacagaccaggcccctgtacctgtttggtccccacacagtgctgtggaagccaccgcccagtctgcatagcacagcccagccccgcatgccccctccctggttgccctccctgttcccggccaggcacttgctgtgcaggactggctaatcctcccacccgcttgcagaggttgttccagccccatcttaacatctttgtttggaggggttaccccgaggagacagctgcagtcttcccagagcactgctaaacagacaccttctatctggagaggcccttctctatctcaccaaacaaggcaacaatataaacaacatacacactgccctgctgccctgggaggagggacgaggggtgagcagggtggaggccacagctagttctgcagcctgagagcaaagcagggactctgggggactcttgggcatgggggcttcctagaggacggagccccgctgagtcctaaggggtggaggagcaggagcgggtcacacggtggcctgcggatggaagctggttgtgagagcgagaatccaggaagagggggctacggctatgggctgggggctgggctgcccccgagggggagggagccatgccctctgctttgccagcggagtggcagccgggcagtgtgggcaagtccgggcccggggccagcccaagcacacttgagcgtccctgggcaggtcccacggagacccccccaaagagtccccacgccctgacctactggccgtatggtgccggggccgtgagaccctccgcgcgctgacccgagctctgagcagaacccatccccgccaccaccaccgcgcctagcctgcccctcagggcgcaccccgcccgcgtcctcaccttgaagcaccccggcgcctggcactggccagagcagcagcagtagtagcagcagcagcaacggggtcccccgagctctccggggcctccagcccatagctgtgagctcctcggcctctaggcagcggctcgcaactccggctccgcccaggctggattgcggccgacccgtgcccggtgcagcctcaggccgccgccttcggaccttcccgcccccacctcccaccgcccgccctcgctcccgcctcccctccccgccaaccccgctcggagcctggccaggggccccgacggcgcgcgccatgggggagccgggtcgccactcccggaccgccgcccctcgagggggtggagctgggcggaggagggaatccgtgcggcccctcggatgaccggcccgagccgtccctccccgtcggtctcagagggcctctactcctgagaggaggagagaaccgctgggaaggttcttggaggaccgcggcgtggtgggatgaggcggtgggcaaaggccgcctctcgctgctgaagttggccccaggagcgcgatcttccgtggtctcctggggccgatctctgtcccctccttgctacccgtcctgccccgagggtgccctggcggaggttgagtcgggtcatccacctgcactgggtgcccccaaggataggaaggttcaggcaaccggctgccgctgtcttgggggcttcattgctgggcaaaggcgatgcagcagacggagacaacctttcttccctggcggtggccagagggcagaattgcataaaagctgcagactcccaggcctgggagaccctttcggcctcagtaacatctgtttcatgttttaaacttttgttttcctactcggtgcaaatttggatgagatgttaactttttttttttttttttttttgagatggagtctccctctgtcgccaggctggagtgcagcggcgcgatcttggctcactgcaacctccgactccctggttcaagcgattctcctgcctcagcctcccgagtagctgggactacaggcgcgcgctaccacccccagctaacttttgtatttttagcagagacgaggtttcaccattttggccaggatggtctcaatctcctgatctcgtgatccacccgcctcggcctctcaaagcgctgggattacaggcatgagccaccgcgcccggccggagatgttaacttttaagcaaatcttttttttttttttttttttttgagacagagtttctctcttgttacccagactggagtgcaatggcatgatctgggctcactgcaacctctgcctcccagattcaagtgattcttctgcctcagcctcccgagtagctgggattacaggcattcgccaccacgcctggctaattttgtatttttagtagagatggggtttctccatgttggtcaggctggtctcgaactcccgacctcaggtgatctgcccgcctcggcctcccaaagcgctggaattacaggcgtgagacaccgcacccagcctacttttaagtaaatctatttgtttttgagaatttggaatgtagtaatttggttagtgaaagttcgagcagtgagagaaacctacattcacatatctcaaaatcaaaaagtacagaaagcatagggaaaagtctccgtgctcttagccctcctcaccaacaggaaaccaatatgattagtttctttcataggcttttagattattttttcacactcaagacaatacagacatatttttttctcttattaacgtttttctgcactttgattttcttttttttttttttggtcgcttaatacaccttagatatcagtgcgtttagagggtccttgttgttcttatgattattatttagagacagggtctcactctgtcacccacgctagaggacagtggcctgatcatgcctcattgcagccttgaaatcctgggctcaaggtatcctcccacctcagcctcctgagtagctggaactacaggcacacggcaccaggcccagctaaaatttttaatttttctgtagacaggggggtctcactttgtttcccaggctggtctcaaactcctggtcttggccaggcgcagtgtctcatgcctgtaatcccagcactttgggaggccgaggcgggcagatcactggaggtcaggagttcaagaccagtctggccaacatggtgaaaccccatctctactaaaaatacaaaaattagccgggcatggtggtgagtgcctgtagttccagctacttgggaggctgaggcaggaaaatcgcttgaactcagaaggtggaggttgcagcgagccgagatcatgccattgcactccagcctgggcaacaagagcgaaactccgtctcaaaaaataaaaataaaaataaaaagaactcctgatcttaagtgatcctcctgcctcagcttctcaaatcgctggaattacaggagtgagtcaccacagctgtccagctacgagattattacttattattactactttggattttcaaatcaacttcattaaggtataatttacacacaataaaatgcacttattttaagtggccagtaagatgagtttcgataagtgtatataactacataagcatcactataatgcagacacattccctcactcacagaaagagccctgtgcccttccagccaaacttgcccactcccaaccccagacagccactgatctgttgttctctgtctatagataagttttgcctgttctagaatttcatataaatggaatcatgcggcatgcactcttctgtgtctggcttccttccctctttccgatgtttttgagattcatttacactattttgcatatcaatagtttgttccttcgtattgctgaatagtgttcggtggtttgagggaaccacagtttctctactcaccagtgcaccatagggttattttccagttaggggctcttataattggaactatatttgcacagagagagagagaggaagaaagagggagagagatatttattatagcaattggctcacgtgattatggaggccaaaaagttcccgaatctgccatctgcaagctggagaacgaggaaagccagtggtgtgattcagtttgagttcaaaggcctgagaaccaggagcaccagtatggaggtggctcgagctcagaacaagttggggacaggaaagcagagcagcgccccagagcagcccctcagcgacacctcttcagtaaagcaaggctgaacacagaggggctggcttcagtgtggatgtcaggtacagaaggcagctcgaggagctactctggcgttcttgcttactggtattcttacctcgaactggccaactcctacttaaactgcaggccatggctttaatgtcctgtcattcagaggctgtcccttacccaaagccaggttagcatcccctgactgacacttctccctgcaacacgtttcagaaggccctgtagtcgtccacttccctgtctctctccccaagctcctgagctccatgtggtctgggaatatgtgtgttgctcacttcctagcacagtcagtgctaataactgactgtagaggggacacagtcgaaaagccacatggggatcagagtcatccttacacagttgacacctcccaaacccagatgagctgtgtccaagtgcaggtcagaggaattttctgccgaagtctctgagaaagggtttatttacattttgaggttgcaggggaggagatgaggccatcaaaccaaagctgaggaagagggatcctaggatgcaccgagcagctccgggggcgcctgacagcacctgggaaagatggcttctccactggcttgttggcgtcaccctccagaggggcatcaggaaatgtcctgggaaccaggcaaaccagtgagcattaacccttaggagtgcttggcatgggtgacacccaccatctgtaaacacgacttctcccaaggagtgacgcagaacaggatgtctgagggaggcactccgactccagccttcagagatcgccagggtggcacctggtgacgacaggctgatgcttgggtgccccggaaaaagtcatgtgtgtgaatgggggccccaaagccaacgcttcatccctgacagcctggtgcatttagaggggaactttttgtcccttggcaaggtgggtggaatttcaggttcatagggcaagggtattttagctttaatagatattgtcaaacagttttccaaagtcattgtacacactctgtgattctacttaagtaaagtttaaaaacaggcaaatcaaatctatggtgttcgaagtcaagacagtagttacccttgtgggggctgcaactggtacagagtgtaaggggggactgtaggatggtctatttcttgatctgggtgtgttcgcttttggaaaagtccttgagttgcatttataatgtgtgaacttttctgtatgttacactttaattgaatgtacaaaaagtctcaggaggcctcagaccactggaagcggacacaactaacccctctgagagcctccaatccaagatggacatatgtccccttggaagtatgcagaagcaggtgaagactcctaagccggatattcccaaatccccccagtagctgcagcttcagcagctgcttatggtcctccctacaccctctcttccccagacagcccccaaacatctggctgcatttgacttgctctctccctgtcccacctctggatttagtccatgttctccaccctccccactgtcagcaatgtagacaagacaaacgcttagttcacgtgcccacctactgcgtgccatgcacggggctggtcattgtgggtggcaaatgtgagcaacacacgaagcctcaaggagcagaaagggacacaaatcacttcagcgtaaggtaatttgtgataaatgtcatgtaacttgcagcccctggccccctcctacagatggtgtctaagaataaaccccactaacatgtgactcctctgttctagcccagctgtttgggttgcaagaaagagactcactccagttgcgtcataggatggagttttattgggaggacattctggacgggctcccagcaagagtctggcaatggagcatgaaaatgaatgagcctggaatgagggagggtgcggcctcggctacacaaagttcacccgcccccaactgcctcccagcgtgttagctcctgtggcaactccccacttctctctctgtttttcaacccaaatcctagagcagagggctcttcgctcctcacaccatctccaccaggctgcagggggagtcactagcccactcaagagctctctcctgttggtccctgattcgcaggggcacgtcattccttcttggtaactcattctctttaacagcccgacacagggtctccaggaaaaggacaggagctcacacagtcatgaacagagatgcatctggagcaggaataaggatgctgacaacatctgtgtctgccctccactcttgtaagggccagtaaggtagtacccagtccctgggggtagggggggtggtggtgggaatgagggcatctcttctttcaggggccaaatctggcacaaggatgtctgcttaggcaactccactgcctggcatgctctctccctaggaaaacaccaaaccttttttatttcctcagtcttagtgtgagagtgatcacctcttccaggaagcccacaaccagaatggccaggggcacaccctggccctcagtagatgggcactgagacaaaacatggcctgctggtggcattcccaacaatgtcaaaagtctcagggatgagctcacagttgggagtcctttggaagtccaattccaaatgtcctctggactcaaaataaaaactacatttcccagtctcccttgtagcttgcagtagccatgtgacaatactccagccaatgggaagtgagtggaaaagtcctgtgcagcttctgagttgcgtccaccatgggcatgggtgtgcttctacctccactcttccttcttctggctggagggcatgtggacaaagcggggccatggtgagcctcacaatcaaaggcatcattttagggatagagaaaaggaagatagaaggatcctgagccccaacatcataaaccatcgtaacagccagactagcgtgggagagaaaaataaaattctatcatgttgaagtcactgtatttggtctcttgttagagcaggctgactgatactctgttgaatacagaatgccttggtgagcctctgaggatgcaggatgctgcaatccaaccaaagtccagggtgactttcgaggagaaggatgtgaaagggcagggcttcctttgagggagaaatggagagaagggaggagatccagagaagagagagcgagatcagctcagtgctcttcagtgtcctccagggtcaacaccctcctgggcagacctctcaccacccatttttgggggggcaagaggcttggggccaggtcataaaaagtcagatgtcacagagctgttttcgtagaggcgggcaggactcaacactgcctcattcacattcataggctggagtcatcacagattctggccactttctcctccggagggcaggcaacaccactggtcagcccaggggtggggcacaggttgaggtctcacatgtggctgcatcaggatcaatgagcttcccacagagaaaaccctggtcacaggaggcctctgggagccagggcaggcccccaggcccccagcctcaggtggggtcccaagaggattggtgggagtgtgcatggctggaagtgtgacttggagccctggcctaccaggtgaatcagctgcagaagggacacaccacaggggaggagaaactgactttcacttctgcccaggtgacgggcaggcttgggagtggggaagaggcctcagaacaaaggtgggggagtcagaacatacgtgtcttggaaatggaggggatgctgccaagtccagaaagtctcccctagtcctctaagccagccgccagctgacacagggattccctctgccccgagcagaacagggctctcctatctcctgaggggctcctggttccctgcacactctccccaacctccccttggtcccaggcaccatcctctaaatgacagcagtctccagatgccagttggcactgtgggttagctgggtattatatctgcccgtgtgtgttgaatggatacctgcgtggtctctttctgaaaagccatctccaccgaattctcgcccatgctctgcttacaaacacgcctccttctgcaaggcccggagtggactcagagagcctctcccctccccacctcctgcccccattcctctcccgctccccacaggctggctccagaccacaagagcgtgggaacctcatggagagtgggtgcttcctctgtcttcctccctagcccttgctttagcacagccagggcagagaggaggaaagaaggaaactacagcaaggaggatttagggacaattctagaagggatttccaatttggaggggcagtctgggaagtaggcagcctgtgaacttaataggaggtcctaaaggacctgggggaatttggggagaagacgaggtgggctgccttaccccaatcttctggcccactcccagctccagacccacctccaggtgtagcaggcccccaggcccaacagcaggagcaggaggcccaccagcagtcccaggacccagagcagctgctggaactgatgcaggcggtgcagggctggaacacagagcgggactcagagcagccacagctgcaggcccccagtgcttccttccaaggggacccacccaagatgacaccttctaacttttgctttatcgctgaagctctccacacaagggtgccccgagcaatcagtttagagtcgacaggcaaatcatgctgcagcaggagggatacagggaaggaagcctttgggcctaagagctgggcttttgtgcagagtggcctgggagatggagccccctcccctcacctctgaccccaaagtaggtggaggtagaggcagagcccaggacatttgaggcagaacagatgtattccccttggtcgctgggcctcagcgcctcgatgtccaccctcagggcattgggggaagccaggacatggatgtgtggctctgcaggagcaccctggggctgactggaggccaccagtcgactgccaaggtggagagtcaggctggcgagcggctcgctgtccactcggcaatccaggatgccccggaggccaccctcaggctccacgaagaccatcatggtgggcgtcttgggagggtctgtggggaggaagggagtgtggtgattgcagacaatgaccacaaatttctccctccctgtacccatgcacagtgactttgctgctcctcccattaagaggcagaacctatttcctcactccttgaatctgtgactcagtttgaccaattgaagaaagaagtgatgttgtgcaacttcagagccagacctcaagaggccttgtagcttctgctctacttgttggaacacaacaatgtgggaagcccaggccagcctgctgggcacatgtggcccaactggcagccaggagcgtgcagtcatctgagaccactgggcaactgcagccacatgaggtgtgaacaacagaagaactccccagctgagcccagcccacagaattgagcagataacatgacttttgtttgaagcagtaagttttgttgtggtcaatagcaatagctgactgatacagtgtaggccttggtgaaggctggagtgggagaccaagactgatgagggcttatcgtgtgccagacacactcagcacgctttatttcttttggttttttctcttcttttcttttcttttttttttttttttcttgagacagagtctcagtctgtcacccaggctggagtgcgttgtggtgatcttggctcactgcaacctccacctcccaggctcaagtgagtctcctgcctcagcctcctgaatagctgggattacaggtgtgtgccttcatgccgtgctaattcttgtatttttagtagagacggagtttcgccatattgaccaggctagtcttgaactcctgacctcaagtgatccgcccacctcagcctctcaaagtgctgggattacaggcataagcccctgcaccagccatttatttcttatacaacttgcaggatgaggcgaatgatgtattccccattttacaaggtcacccaaccagacagcgggagagccaggattccaacccaggactcaatatccgtgaagccttcactcttggcagacagaagaggaggaagaactgaggtgggcgtgtgagatgtggggagactaaggcggaggagggggttcacactcacagagcacacggagcatgactggagcagaggcagcagccccagtggggagctcagccaggcagtggtacatcccagcttgagcacgagccacgtgggtgaaggcgagagtgggcacaggctccgcgtgcagccgccggtcattccagaaccatgcaaaggtggagttgcccacaggcccagggccacccaggaggcggcagctgaggttcagggcagcgccctcaggcacgtccaggccaggctctgccaccacgcgtgcacctgcgggcggaggatagagagatgattggggatctgtaggccttgggggctggagcctctgggtgggacctctgaggggcctctgcacattgtgggaaggtctcagtctgacttggtatagggctttccaaggtggaaccatgccccctccagtgggagctgtgccccctccaccagattaggcttctcaaggcagagctttctcagaccagacagcccgctctagtgggagctccagcccctctcgtggacttggacctgagagcatcagagcccctcctcctcccctctcttccactcaccttctacctgcaaccgcccgatggtgctgattgagcccagcaagttttgggctgtgcaaacataggtgtcatcacctgcaggcacatcttgcacctgcagccgtagggcgtttcgggccacctggacatggcctgtccctgatgccaagctgtggaccccgctgctcgtggccagcaccttgccatcatgagatagggccagctcagcaggtggctcactgtccacagtgcactgtatcacagccatggatctggccctggagtcccggaaggaggacaggacagcgtcctgaggggcatctgtgggcaggcagggcacagatggggaccttgcttaggcaccctgtactgctcattgcctagctgcctggggttggtcaggctgaggcctctggaccaatggccacttcctagaagtgacaccttcccaggagtcctgtgggcagagtgctccaggcagggcttataggactgtctctttctctagcacctatgtcctctttccccaactgcccattcctgggcccactgcagtcctttgcccactcccaccagagcccagaagcaccctccaccaccctcctcctgggcagccctggccaaggaccctctgctcacagaggacttgcagggcagcaggacgggagctgcgggtgccctgggcatcctgggcctggcaagagtaggcgcctgcatgagcccgcgtggccaccaggaatgagagtgaggcagctggaccctcctgcagccaacgaccgttgtggtaccaagtatagagtgtgggtgcgtgggcagcagggtccgcacaggtcactgtgatgggggcaccttcaggcacggcagcctccggagccaggatcacccgcacacctgtgccaaggaggccaggatcagccgggcccagccggacaccacagtgggcttccatcccagtgggcttggcctaggccctgccttaccctccagccgcagctccagggacgtgttggcctggcccagagggctgcgggcagagcagctgtagaaaccctcatccctgggctgtggccctcgcagctccaggcgcagggtgttggggacagaggctgctgtcgaggaggccaagaggcgaccggcgtggctgagggccagctgggcgggcgggcggctgtccacagtgcacagtaccagggccagctgcccgccatggctctccaggaggtaggtcaggcgcaggttgcggggcgcgtctgcagggcatgagaggcttacacggagtcacaggcagcagcctgcaggaggccagtttgcaggtggcattcaaactcaggagggccctggctccccacccctatggctcccaaccacccagtctgaggcactgctcctctgcccagacaggactcaccccagcgccccctactcttaatgctccttgcccagtgctccactagctactgggtaccgagttccccactggacacctgtcgggttccggccatgccgtgatccctgtgggcttctgtcattcctgtgagtcccaccctgcatccagccagactcacagaggacgtccaaggtgataggtctggagaggcggggtgcccgaccaggggggcccacaccgcagcggtaggaggtggcatccctgactgtgacgttgggcagggggatggagtgggcatccaggcgctgctgcccatcctggtaccatgtgtaggtgagctgggccgggtgagtggtccacacaaggcaggtcaggttcaccagctgcccctcccgcacggtagccccgggccacacctgcacattcacagctggggagagggagggcacaggacaccagtgagggtcttgaggctgtgtacagcaggccacctgtctccatgtgggtgagctactcctactgctggggagccccttggcctttgggagccttgggtggcccacctataaatgtggcttagaagtcaagcttgggaatagcccactggctcctgagtggtcccaagtagagttccacagagtcctggaaagccctgagcccctccctgaccctggctgggggcaaatggggagaccacagacctcccctcccctgctgcactttctcctgaaattccctgtttagttttatccactgggcatacttgtaaaatttggtgtttataaaaggttctcctaagaaactcaagtctggagtccaccatcgttaggaagggtgggaatggggactattcccgtgcccccaggcttctagaaccctgtcccacctcctctcctcttttaaaggacacacacacacacacacacacacacacacacacacacacactgaccttgagcgtcgaagtcagctgaggccgaggcctggcccagggtgttggaggcctcacagatatagacaccctcatcctccagcatagccccgtggatctccagacgcagtgtgttgggggccacagccacatgcagcctgggagagctgccttcgggtccccccacaccttgtagggtggaggccacaaggcgatccccgtggagcagccgcagctgggccggagggtcactgtccacacggcacaggaggaggcccagtcgtccagggcctgtgtccatcagggtagtgagtgtgacgtggcgtggggcatctacacagggtggggagtggtcaggacccagccaggggggtccctcatccagggctctgtcatgtgacacagcccaggactgggggactgcattccttcccccacacctggatgggacaaaagtccttacaggacacgtggaggctgatgggtgcagctaggctcgtggtggctgagcctggggcctgggcttggcaatgataggccccagcttgtgtcaaagttatggctgcaaagcggagcgtggccgaggtcgactcctggaggggctggccatcccgataccaacgatatgaggtcccctctgggactcctgtgtgtacctggcagctcaggaccacagcctggccctcttggagctcaggtgatggtgacacctggacccaggctcctgcaggggaaaaccaagagcaggtgagggctctccaccacacctctcacagtctgggaccatgtgcgtgtccacctaggactacacaacccaaccccatgtgctggagccgcagccccttccagaccaccgccagggcccactcagccctatgccttggcccctcctgctccccactctcctgcacaggctccatcctggcatttacctcccaccacctggtgggatggttttactgtgtcagtcatatctcgcctaccaaagcgtaagccttatgggcactggacttgtgtgacctgtaaccccagttccaggcactgtgcctgcatgtgttagctcctgacaaatgttggttcaacccataaagtactgaaaagggagggatttagatcatcccggggccattgtcctaactaggatctggactcagcatgggtgaccgagggcttggaagggaatgttagcagctatgttatcttgagcgctctcgccaggccagccctgcatccagactccaggccacaagagcacaggacctggggaccaggcaaagggcagctcctcagtggcccctgggtgtgaagcaggagaaccccaggttgcagggagtgagatggagggacagctggaatgctaagcaagaacacagaccatgcctgagaccacagctagcagggtcatgcaactggggaaaagctcctaaaactcaaaccttcaatttcttcctgcgaaataggtatgctaagtaagaaaagatacacagaaccaaggctcaaagtaaatgtcccaaaattggtgctgtcggtcaccgtggtggaagaaacactcatgttcctttgaccttcgcattatgggcattatctttcctttttcctggtttatttgtttagggagaatttttttttttttaagacagagtctcactctgtcatccaggctagagtgaagtacaattttggctcactgcaacctccatctcccaggttcaaacgattcgcctgccttagcctcccgagtaactgggattacaaatgcccaccaccacacctagctaatttttgtatttttagtagagtgttggccaggctggtcttgaactcctgacctcaagtgatccgcccgcctcagcctcccaaagtgctgggattacaggcatgagccatggtgcccggcctgagggaggatttttatagagactatatatatacacacacacaaacacacacacacacacacacacacacgtatgtgtatataaataaagaatatgaatatattatgcataagaatacacataatgtatatttgtatgtgtatatactcatacataaacatatatgcataatataaatatacatatgtatgagaatgtttactatgtaacaaaattatatgatcacaaaacaagttatttcagaaagtgctcccaccaagcaagccactctgtgaattgccattgcctcctagtggctgctgcagttattacaggtgaaaatatctagctggaggcaaagggaggccttctgctggctggaaactgcccttaccaggactgaaaaagacatatttctgcacaaaattcacagcacccagcccaaagtctgaccagagtagtccccagggcatcagagtctaccatatcttcagaagactgacactcacctcggacctggaagaagagtgaggtgttggatgatccaagaacatttgtggcctcacagcggtagctgccagagtccccaaggcccagttctcggacctctaacttcagggagttggcctcagctttagcctggaaccgaccatgggatgggacctggggacccaggctggtggccaggaggtgctccccatggaacaaggccagcaaggccagggggcggctgtccacagtgcagatgaacagagccatgtggccctggcccatgtctaggagggctgacagctttggacggtccgggggatctgcaggaacagagggagctgaggccacccagcctagctcaccacattacaactgccacactatgtcccccacctcctgccacacacacagcctaagccatgctctttcctccccaaaccccagcccggcccctgcttctccccagaccacccctccaccctccaagtccccaggctgcccatgccagtcacccacagagtacactcaggagcacgggagtggagagctgggcaccagcctcagtcaggatgcggcaggcgtaaagggcagcatcagttctggccacgggcagcagtgtcacggtctccaggggaccctgggcccacagcaccccatttcggaaccaggagaagttagcagggctgccagcagcttcccggctcacgttgcaagtcaagttggcttctgtgccctcctgaagtgtgtgtgatggtgcaatggccaggacagtggctggagagcaggcggcacagcttactgaccacccccggcccccaggagccaggggtccagccgcccagcctggaaggagcaggaaggaggccccctggggtgcccacagggttggggagaaaagcaagctagctcacagggcagcctaggagaagtgggccctggggactgtgggggccctgggcagagagggttgcagtacagggaaggaggacaaggcagcccaactgtcccagctggggagtccttcctcagagaccagctgtgttgcctatccccggcctgaacagagatcatgggaaggagcagctccgctcttcctgaatgtggaggagggcagcgaagggcccccactgctgcacagagtggttttgcctgattagatcctcctcggagcagaacagtccagagctccagcccctgcccccaggccacccattccctgcctgactcaccctggccattgaaggtggctgaggtggaggcgttgcccagggcattgctggcctcacagaggtacaagccctcctcttccagcaaagggttgtgaatctccacacgcagcaagttgggggctttggtgaccttcatgcgtggggaacagcccccacaggtgctgcagccaccccctgatggcagggaagtggccacaacacggtccttgtggagcagctgcagcctggcgggggggtcgctgtccacacggcacaaaaggaggcctcgccgtccagccccggccccagcggcatcaaggtccagcctggtggtgaatgttggttgtcgaggggggtctgcagggaggaagaacatgggcactcatcccacggatgctccagggccccacaagcctggctaggctcccagaatacactggacaaaggcagatcccgaaggctgccccaagcagctgtgcagactgtgcactgcacaagggcagccagaccagggtgggtggaactcaagctaggctcatgctcctcaagctaagctgtgccctgatgcctactgagtcttcccagaagaaggagcaccattttctagctcagacaaaggtgctgtatgggctggctgccaccttgcataagtcccatctgctgctgagcagggtgcccacctagcaatccctgggggtcatgctgtctgctcccaccctgcacccaatgccttaccacggagcctcccctcaagatctgccctgcagcttatctgtgatctccaagccagctcctgtgatactagcgaatgcatagaatggcctcttcctgaaggcttctggagacagttggccaaaagagagcaatcagccaaggcccccatgtgatctcactcagacaccagaaaactttgcagaggcagctgccctctgacagttccgggacgtggctccggcacacatgtgtcaggggaagcctctggaatcaggcccttggtcttacacggagcctccccgcttggcggatgcagaggggctgtctgtccctgtgctgaggggctttgccttggtgtctatgggagcccagcacagcctgtggggcatgtgcacaaatagaggagtgtggtgtcccagggctcacccatgaggacaaagcatggatgtggtgcccatgctgagcttgaggctgggacagaggagcccacagggctggcattggagggtaaagacatggggaggtagagaaggccccagcctcatttcctaaacttcagccccacatggaaagacccactgtggccaggtctgtgacccagccctcccgatatagaccgtggggcagggcaggacagggctggggggcctagaggaggtggggtggctggtgggtcccggcaggaggctgcaacaggtggtggctgctcacagagcacagtgagaacagctggcgaagaggggccactggcactgtggccgtcccgggcccggcagtggtatgagccggcgtcagtgctggaggccgcggggagcaggaggctgctgccgggaccctcgtgaagcagggctccattcaggtaccaggagaagcgggcatcaggtgtggggcttaggccgcttctgcagctcagtgtcactgcctgtccttccaccacctcggctgccgggctgatgaggagacgggcggctgcggggagaggaagaggctgggaagggtccctcctctcaaccccacatgctgccctatatagaaagccttccagggttctcctttccccacactactgtaggtagctctgggctttgtggtgcatcaggagggtttgccctttaatgccaaatcagatctattggtagtagatggctgcagcatggttgaagattcagagccagagcccaggcttatgtccaacacctggcttggctgggcatggtagctcatgcctgtaatcttagcactttgggagactgaggcagaaggatcgtttgaggccaggagttccagaccagcctaggcaacatagtgagactccatctcaaacaattttttttttttgagactgagtctcactctgtctcccaggctggagtgcagtggtgtgatcctggctcactgcaacctctgcctcccaggttcaagcgattctcctgcctcagcctcccaagtagctgggattacaggtgtgccaccacacccagctaatgttatacatgtagtagagatagggtttcaccatgttagccaggcagatctcgaactcccgacctctggtgatccacccgcctcagcctcccaaagtgctgggattacaggtgtgagccactgtggccagctttttttttttttttttttttttttttttgagacggagtcttgctccgtcagccaggctggagtgcagtggcgcaatctcagctcgctacaacctctgcctcccaggttcaagcaattatcctgcctcagcctccctagtagctgggaccacaggtgtgcgccaccacacccggctaatttttgtatttttagtggagacggggtttcaccacgttggccaggctgatctcaagctcctgacctcaggtgatctgcctgcctcggcctcccaaagtgctggaattacaggcatgagccaccatgcctggccacaattttttttttttaattagctgggtgtggtgacatgggccgtagtctcagctatttgggaggctgagatgggaggatggcttgagcccaggagtttgaggctgcagtgagccatgaacataccattgcactccggcctgggcaacagagcaacaccctatctcaaaaaacaaaaagaaaaacctggcttgatcaattagctaccatgccctcaggaggagggaaggacagtgcacataccgaaagttggaagaccgtacttttcttttttctttttcttttttttttttttttttttgagacagagtctcactcttgtcacccaggctggagtgcagtggcgctatcttggcccactacaacttccacctcctgggttcaagcgattctcctgccttagcctcccaggtagctgggactacaggaactcaccaccatgcccagctaatttttgtatttttagtagagatgggatttcaccatgttggccaggatggtctcgatctcttgacctcgtgatccacccacctcggcctcccaaagtgctgggattacaggagtgagccaccacgcccagccagaagaccctacttttctatttggcttcccacatctgactgctagcatagagcctgctcccagagtttcataattaaaaaacaatgaatgcttctgagggactctccaagtttagggtcagggtaggtgcaaaaggaatgatgtgacctgttgtgtttccctttttcccttgacttccaggaagctctgccgttgggtcactgcacagcccctgtcttttatgtggcgtagccagttagctcagtcctgcggttgagtccactagacttctagaaggaacagactggagcaggctcctcctcaggctccctccactctccctggctgccagtgcccatcttaccattggcatggaagtccagggtggaggttgcatttccaagggagttggtggctgagcacttgtactccccactgtcagtttcctccaggtctcggatctccaggcgcagggagttgggaccagaggtaccactgaagcgtgggctgtgatcactgtccccggaggtggaggccaggatatgacccccatgtgacagcaccagtgtggccaggggctcactgaccacagagcagtgaaggatgcccacaagtcccgcctgggtctccaggaaggctgtcaggactggagtgagaggcgggtctgtgtggagacgagaggtgggcctgtcaccctcagacaagggcattccctggataccctgatacaacccgtgacctctgcaccgctttgtcccacactgccctgtgagaagggggtgatcccaaagtgcctgagtgcctgctgaatacacttttgtccttggctgggctgggtacgtcactctgttgtcccagtcagtgttcaaggccaccctgcaagtggggataaaagccccacttcaaagatgagaaaactaatagagagacctggtgagggacagcacctcagccaggtgaccaaagtgagcatcatcagcaatgggacaagctgacacagagtgcctcctgacagggcagagcagcatgtccgcggccttcccacccagagggcatggtctcaggccattcaagtcaggcaaatgtggagtgagggacctcctcagaacagcaggcctgcactctgcaagtttcaatgtcaagaatgacaaggaaagactgaggaacagtctcagactaacggagaatgaagagacgcaacgacccaatgcaatatgtgaactgtgattgtattctggaccagaaaaaaaatggctacaaaagacagtattaggtccactggtaaaatgtgaatatagattatagcttagataacagtcttctatcagccaggtgtagtggctcatacctgtaatcccagtactttgggaggccgaggtaggtggatcacgtgaggtcaggagttcaagaccatcctggccaacatggtgaaaccctgtctctacaaaaacacaaaaattagccaggcaggatggtgggtgcctgtaatcccagctactcaggaggctgaggcaggaggagaatcgcttgagccccagaggcggacattgcagtgagccaagatagcaccattgcactccagcctgggcaacacagtgagactccatctcaaaaaaaaaaaaaagtcttctatcaatgctaattttcctgatcatgatcattgcattgtggatatgtaagagaatgatcttaggaatttagcggtaaagaagcctcatgtctgcaacttcaggaatataaatatgtaggtagatacataaataacatatgcatatgtatatagagtgtccatatatgtataagtgcacatgtccacatagagtggatgtgcatacacacaagtgcacctgtatatatgcaagtctatatccatacatttatatgtatgtatgtgcgtgtgtgtgtctgtgtagacagcgagaaagattaagcaaatgtgccaaaatgttaataaatgggaaatctaggttaaaggtatataatcattatttgtctttctctgcaacttttcataagtttaaacttccaaatataaaataggagggaactagggaggtcaaagcattgcccaggtgtgcagagctgggacatgagctcaaggccacctccaggtaagtggccttgaagttcccatgcccaggaccccaacccttccttggggctccaccatctggtcctgctctgactgtgtccagtgccaccccaccctggcctcttacggttgactaccacgctgacagggcccgagcgctcgctgccatggacgttctgcacctcacagaagtagaagccagtatcagccctagtggccaagtgcagccggagggtatgggagtgggcatcctccagcaggacatggttcttgtaccagctgtagcggagatcactgggtgcctcattgggtgtgttgcagactagtgtcactgtctggttctccaggatgggacctgctgggctcacctggacctcagccactgcaagggcagcatagggagtgctggggggtcccagccaacttccagccccagccccatacagtccccgggtctcagccaatcagcctcaatctctgcacatcctacaccacccgcctgctgctacaggggagcctcctggagtgctctgcatctctttgtcctgctcaccaggatccccctgacaccccacccttcgtgggggtattgtcacctgtctcatggtaaggcagggctgggactccacacctgcatccaggaagcactgggttatgccagttgctggccctgccctgccctgtctcccctccgtccctgaggcctgagctcctccctattctctggccaatacgcaaccttcccaagaactcactgaagatgtggaggctgatggggggtgagaccaaagagcccacgccgttctcagcttggcaggtgtagacgccagcatcgctccaggctgcctggggcaggtgcagcacaccagtcttggtttggaggcgtaccccatccttgagccacttaatggaactgactgcagggtagctgctgttcacctggcaggtgagtgtgaccagctcacctggaaggatgttcctccccgaggggctgaggaggatcttcacacccttgggggcatctgcaagtcacagtagggggtattgggtaaggtgcttggggagggcagaggatggcacacttcttcttgcccccctttaaaagctcagtcctaaggaagtatgcccagataaaacagcagtccccttcaatcctcacccagggcatgctctgtctgcccatgtccgtccctttcccgccccctgcgcctgatgcattcctatgcccattgagagctgatcatgtgacgcttggccagcgtccagcctaccccaccagctgtagttttctgcttcccaatgctgtccattgctcctgctctatttgggatgagctccacacacagggtcatgggtaccccactgctagctttagtggcctgtggaagctattggtaagggaccaactacctagtgggagggggccaaaggcagcatcaaactagctctgaaaatagttacccagtttgtaagcaagaggccaacaacacaaagaactgcatttccttaaatcttgttccaaagcctctctctgtgtattcaagtgttttattcttatttttttagaaagaggatctggctcagtcagccaagctggagtgcagaggcacaatcatagctcactgcagcctgaaactcctgggctcaagtgatcctcctgcctcagcctcccgaggaactgggactacaggtgcaagccaccacatccagctaatttttgttttttaatttttttgtagagacagggtctcactatgttgcccaggctggtctcgaactccttgcctcaagcaattctcctgccttggcctcccaaagcactggggttacaggtgtgagccactgtatccggcctcaagtgtttaatatgtgccaggcactcttctaaatccttgacctgggtcatctcctttatttgtttttgttgttgttgttgttttttgtttgagacacagtctcactctgtcacccaggctggagtgcagtggcacaatcacaactcaatacaactccacccccggggttcaagcaatcctagtgcctcagcctccttagtaactgggattacaggcatatgccaccacacccggctaatttttgtatttttagtagagacgaggtttcaccatgttggccaagctggtcttgaatccctggcctcaagtgatccacccgcctcagcctcccaaagtgatgggattacaggcataagccaccgcgcccggcccatctcctttaatttttatcataaatctgtgagacaggaaccatctattgttatcttcgtcatagactgagaaaacagagccaggcaggaaagggataaatcccacctccccagcatcctccagcacggggtaaatcccggggcacttgctgccaaccctgaagctgcatgggagctcctgttccccaaccctttgtgtctccctttctctgcccagcctggcctcaaggacaagccccttcgaagcagtaggaggtggagggaaccatttaacgaagtccttggggctcagcagtgtctctccacttgccctaccctggaggcccaggagcagcctggttttgcatcaggagcaagggttccgtttctgtgggctggagaggggctggtttctgtcaggagcaacagatgcgctcagccacaagggtgtgtccccagacaactcacacttcacttggaggtgaatctcgctctgagccctgtgattggccacggagagctggcagcgcaggatccggccgtggtcctgccaggacatggccatgtggagggtctccaggtggccgacgccggtgggctcaaacttctggctgttgaaggtgacagagcgagcagggtcctggccttgccactgcagtctgacctgctcctgcaggcatacgtagggagtggagcagttgaagtccacctctgtgccctcgagaagctccaccggggaggcaatggtgggcaccctgggctcctctgaggacagagacagcagtgctcaggacccgcttttgccacccctgagatccctcgccctggaaaccccagctgaggagagagccctggggagggggcttttaggggaaggaaagacgctttctactccagccccacttgggtgaatacaagggagaaccaggcctgggcctacgccggggctggaacagaggctgagactggctggggttagattcaggacaagggctggggctgagagccaaggggtccagaagcagcttgggaatccctcccggggggcagccaggccaccccacttatcacctgttactgtgaccaaggtgcctttcacatctgaccagcggttgacctcactgatctcgaagcggaagttgtaggaaccagagtcctcgggctgcaggtccttcagcagcaggttgcacaccctgtgctcggggttccccatgaactcggtgcggccgcggaagcgggcctccaccagcttggggtccgccgagtggctcaccacctgccgctggcccgagtagtcgtagtaccagatggccgtgatgccgtcgggcacctccacgtcggcagggaagctgaagatgcaggggataagcaggcaagaccccttcacaccctgcacgtcctggggactggagacgccccatgaggcctggcctgggggaagaacggcagggggacagaggggagggtgatacaggcctcagggtgccacagagccctgcgacctgccccagagaaggtgccccagctgggctcccaaattctgccctgccccgagaaatgcacacttagagcagcccttctcagtgccccaggggtcagtccactgcccgaggctgctcagaggtttggtagggtggctcgaagacagatggcagcttcctgcccagctcctggccactgcccgattgggccctcccttgacctcagcaaccaaacatgtgacccaggcatagtctaatctgccaagggctggacttatgaaggctggaccctggaagacaggcactaggcccgcaaagcttacctgctgggaagaatgaggccaggaggagaagcttgggcaagaagcccatagcaggttcttgtgctgctcctgttgcctaagagggtggtgcgcactgcgctggctgggctcacaggggcctccagggacacctctgggcactttagccccagcacctgctagaagtccgagcctgtgtccccacctcctctgctggccaacccaataagagggcagggctcttaaagacctctgagtcagacaccagcagagagccaggaggccacgttcccagctcaggctgtgcccaggaatgccctcacttggtggcctgcctcagaaaagcctgtgtgtcccttggccctatcccaagttctgctttcccagcccctcaaggataccaccctaaggcagatgaacagctgtttctccctcttccccacttccctgccccctccccaccacccaaaccaacaggaactggagcccagagatgcccagttactcactccaagacacccagctagaatgatggtttcttcctgaggcttgtctcctaccacctgccttactaactatagaccataatggggctttactgaacttgccgaagtgctgcctttaacagtcactcccctgctcaaaaaccttctgtggctccccattgcccgtgagatgtgaaaagtcctcatttcctgcccccagctctgtccccattccctgctctccgcagacccactctgggggcagttctgtctgctcaagggctccctagctgcccagctctatctccaccacagataatctttgcctgctgaaaccttattcaaccttcaaggagcagcatgaatttggcttccagctggaacttctcctttgaggttcctgtagctaccccagagctatctctattttccttgccttgttttttacagcttgtgagagcccatttctcaggacctagaactgaagatatgtgccccatagcagtgcggagcctaccaggcattcagcaaaccccttagtgactaagagaggggtgaggtctttaggggttcagagctgaggttcagagttggagtggggaggtggcaaggcaagtctaggtttgaaaggtagcatgagagcgctgtggaacacataccccacaaatatgagctcaatgtgtgcggagtgtaccatatccaaaaaggcaggccctcaaccatggagtgcccctggtcagggagtgtctaaggggtaccatagacctgagcccaaaaggaagagatgccagaaacacatataagtgaaactataaaactcttagaagaaaacaggtgaaaatcttcatgaccttggattaggcaatgctttcttaagtatgaaattaaaagcacgaaaaaaaaaaataggtaagttggacttcatcaaaatttaaaacttggccagacacagtggctcatgcctgtgaacccaacactttgggaggctgaggcaggaggatcactttagcccaggagttcaagacgagcctgggcaatactgcaagactctgtctctacgaaaaattaaaaaacaggcctgtggtcccagctactctggaggctgaggtgggaagatcgcttgagcccaggggaggggtcgaggctgcagtgagccatgattgcaccactgcactccagcctgggtgacagagcaagaccctgtctgaaaagaacaaacaacagctgggtgcggtggctcacgcctgtaatcccagcactttgggaggctgaggcatgcagatcacaaggtcaagagattgagaccatcctggccaacatggtgaaaccccgtctctactaaaaatacaaaattagctgggtgtggtggtgtgcacctctagtcctagctactcgggaggctgaggcaggagaatcacctgaacccaggaggcggaggtcacggtgagccaggatcacgccactgtactccagcctggtgacagagtgagactcttctgtctcaaaaaaaaaaaaaaaaaaaaaggatatgaatcaaaggacactatccagagagtgaataaaaggaggacaacccacagaatgggagaaaatatttgtaaatcatttatctgataaaggactaatatccagaatatataaagaattcctacaatgaacaacaacaaccaccaaaaaaaccatgaaatccaactccaaaaatgggcaaaacacttgaataaacatttcttcaaagaagatatataactggctgataaggacatgaaaagatgctcaacatcactaggcattaggaaatgcaaatcaaaaccaaaccacagtgagataccacttcacatccgttagaatggctattcacaaacaaacaaagcaacacagaaaacaataaatattggtgaggatgcgaagttgaaattcttgtgtattgctggtgggaatataaaatggttccgtcactgtggaaaacaattgggtcattcctcaaaaagtcaacataggattaccatatgatccagcaattccactcctaggtatatacccaaaagtactgaaaacagggactctaacagagtacaccaatgttcacggcagcactattccactaaaaggtggaaacaggtcaagtgtccatcagtgaatggatgtggataaacaaactgtggtatgtacatacaatggaatatcaatcggccataaggaggaatgaattctaacatatgtgaaccttgaaaacattatgctcagtgaaaccagccagacacaaaagggcaaatattgtagggttccaattacatgaaatatctagactacgtatattcagagactgaaagtagaataggatagaggtaaccaggggctgcagggagggggagctaatgtttaatgattgctgagtctctcagataatgaaaaagttctggaaatagtggtgatggttacacaatattgcaaatgtacctaatgtcatggggtgtacacttaaagacagttaaaacagtaaattttacattatgtatatttcaccacatacacacccatgttgccaactttgcaatcctccctggtcctaaatgctgacttggccaagtgaacgaggaggctggaagtggggacaggaaactcatgacctcccagctcccagcccatccgcctcaggggctgggctcagcagattccaatgactaccaggggtcacacctgggaagggggtgagccgaggcccagggccagtcaggctgaccaggtgggacttagcctgctgcagaaggcagaaggtgccccagcagggggcacagtacagggcgggattgggacaggaaggacaccgctccccaggggacccagccctctcgcaggctgctggagtggactgatctggccatttatggaggcccaagggctcatctccagttctctaggaagccctaggcctcctcctcttctgggaagatgcacccccagcctccacaccaggttcttggccactggagaatgatatagctggggccctgggacctggacacctcaccgtgaagaaaagcagcctgctgggcacactgggggtcagatgtgtccctggccacaggggatgtcagggtcagctctgctatggccagggcagctatcttgtcccagctcccctgttcctcccatttggggtcctgaaaagggcaatcgtgaacctgatggaagaatggtggggttctggacacagcgaccctggaacagggcgcgggggaggaccctttccaggaccactcccatcacataatgtagaggccacctatgcttagcccggccctaaccccaaaggggtcagccccaccggaatccagcctattggctcagcctgtcaccacaaaggccagcttcagcccagataactgttctggaaacagaaagagcagggaccgctcagaaaggagatctctgtccctgtttgaaagcctggagttgaggggacagtgccccgccccccgccccccgcaacttgggttgcagctgtggcctagtgagcacgcagcgccccctggtggtcgagggggaattgcgggtcccgggaaagggggcggtgtgccagcaacagggagcaggcagctctgcagccctgaaccatccctcccttgggtgactcttttggaaatcattgttccccagacaggaggttcctgaggttcatacttgggtctccaagtcttgggtgctctgaagacaggattttaaatccccactcctactattggtatgtgttgcatcagggtggcttgagctggcctggtacacagtgggcactcacgtttgctgcctgtttgagaccaagtgcctcaggaggtcttggagggttggctggggccccaagtccctgacctctgattccagaggccaagtttagctggggaagaaagggcagaggcagtttccctatggacagctaggcccgggtgtaggattcagtttctgtttcctgacaccaaggcttctccccaacttccccattgggctagagaaggaagaacacagggtgacatggccagctggaggttactggcccacagatagggagtcagggtacggatgggcaattcctggagcagattatggtcaaaatagtggaaatccccaatcacaggccaaatgtttaattctcagagccatagaatccataactaatgcttattggctttgacatgggcagtagaaatttcacacttcattccttaatctggctctaaatgcttctggctggagtgctcactctccaaactgtgctggacagcaccagaagccctcctgtggacggacgaagtggtgatggatgaagtggaattgtgctggggttagagtaaggagagattatcgttgggctgggctggggctgaggtcagggtgatgatcaggttggaattctggaagcaaattaaggctgggattggggtggacattgaggttgagtgatgggtgggggtaagggtgaaggttggagttgggtgcaggtgatggttaagatacggtggaggctgggttgagatgaggatgatagagtcggagttgtggttagggttgggatgatggatggttgggattagatgagatgagtaaatggttagggttggggtgcaagtgaggtgagggtgagataaggttggaataggggctggggctggggctgaggtagggtcagagcagggtgatggtcgggactgggattgggatgcaggttggaaggatttgggggtggtggaagggtttcagttgagtccatctttgattagtgtcttggacttgggttggtttggggtccaccactcgcacccagatggagcccccccccgacccctgcccctatcccgctcagccagtttcagcccagccccgctcctaatgctccactcaccctctgggcccagggaccagggacaggggtacctgctccacagaaggaagtggctgcggcggtgctggacctgcggagaggagaacaggaaggacggccaagagctcctggtgcagctggctccccagggctctgccggctcaagagagaaggatcccgtatcaggggctgcttcctctttcccaaagcctcagctctactgtccaacccagaggctggtcagggaggcagctgcaggccttgcgcaatgccaaaacgggaaagacctccataggggaaggccctcggcaaggccagggacttagggactccagcaagcagaagtgggaccgctgcaacgctggagcctccccaggcaaagtgagaaatggagtgggggactcccattcaccagccaaatccacaccccactctctctgagccccttagggaggctgggggaggtggaagggggcttcctgcacacagctctcctccctgacacctgagagggaggcgcgcccagcctggggtggggatgcactacacgatgcccagaccaaggcagttattctccaagccattcaggagcctccctgtaccactgagtactcttaagaacccccaagaggcagtcccgtgttgtgggggacataaggccccaatgtccaggacactcctcaggttttctctttcccctctcactgtcctgtacgttttttggtttttggcttcttgttgttggtttttttctttttgttttgtttttgcttttgagatggagtctcactctgtcgtccaggctggagtgcggtggcacaatctcagctcacggcaacctccacctcccgagttcaagtgatcatcttgcctcagcctctcgagtagctgggattacaggcatgcaccaccacatccggctaatttttgtatttttggtagagacggggtttcaccatgttgtccaggttggtcttgaactcctgaccccaagtaatctgcctgcctcggcctcccaaagttctgggattacagaggtgagccgctgcacccggccactatcctataccttcacccccaccttgggacaggaaaggaaagcccccaccacagctagttactgttacattactgcagcccatcttattgagggcctagtttgtgcaggcacttgacatgtgaagcagatgttaattgctccaagcaatcccagatacaagcaacaagactttttttggtttttgtttgtttgtttgtttttgttttttgagacagtgtcttgctctgtcgcccaggctggggtgtcctggtgcaatcttggctcactttggctcactgcagcttcgaaattctaggcttaagcaatcctcctgcttcagcctcctaagaagccgggattacaggcgcttgccactatgcacggctaattttttaagttattttgtagagacggagtctccctatgttcccaggctggtctcaaacacctgggctcaagtgactctcccacctcgacctcccaaagtgctggaactacaggcgtaagccaccactcctggccatttttttttttaatttcacaactcaaacttaattcaactcagtccctgcctacctgtactggtggggagctggccacagcaaattaggcccctgtaccctgagggcaaggccacgtgtgcaggtgtaaaaggatgtgaaaccctaaatcagggtggatccagaatcgcaggccatggtgccccaaagcagatgtctggtgacattccaccctgaaatgctcaggctacagagatattaggtctctatcactctgttcctctttatagctcctgtgtccactcctatgcttgggccatttcctctttcggccaaaacacaaagggttcatcccattacttcctccctcaacagctggtccggagacacccagctctaggcctgtggggttgtgacacatgggtaccaatccttcagtccactgggactctatacatccaccccttggcttcatggtgggaaagcatcccttgactttgaccttagtcatatgacttgctctggccaatggatgtgcacggacatgacacaaactaagtcttgaaacgtacttaagcagtttgcctttccccctgaatttctgtcattgccatgcaaggggcaggctccaactaacctgctggtccaaagaggatgacgaacacatgcagatgacctgaatcagacccatggattgaaacaaaactcagctgagcccagcctacgtccaccagaccagtcaacctgtggatgcgtgaatttattgctggatgctgctgagaattttgtggctacattagcaagatgatacaaggcctaagtcccagaacaacacacccagaacttgcttacctttccttagcatgaggagagcaaagacttgtctaccttgattagtcagggagcactgcttcctgtcatttccttgagtatacagcaaactaggtaaataaataaaaataactaggtaggctgggcacggtggctcacgcctgtaatctcagcactttaggaggccgaggtgggcagatcgcttgaggccaggagttcaagaccagcctggtcaacgtggcgaaaccctgtctctacgaaaaatacaaaaattagctgggcctggtggcaggcgcctgtagtctcagctactcaggaggctgaggcacgagaatcgattgaacccgggaggtggagattgcagtgagccgagatcacactactgcactccagcctggatgacagagcgagactctgcctcaaaatattttaaaaaatgtaatttctcagtaggtcacactgttacacattcatctaataacaattattctttttcttttttttttttttttttggagatagggtctcactgtcacccaggctggacaggctggagtgcaatggcacaatctcggctcactgcaactttgacctcctaggctcaagtgatcctcctgcctcagcctcccaagttgctgggactacaggtgagtaccaccagacgcagccaatttttgtatttttttgtagagatggggcttcaccatgttgcccaggctggtctcacactcctgagagttcccagtcaagtgatccacccaccttggcctcccaaagtgctgggattacaggtatgagccaccatacccagtgaattattctcgttccagataggaaaaccaagtcatagggaggttagagaatttgccaaagacaaaactttttggttgaaaaaaaataagttttgctacaagtatagaaaacaccaaataacggtgttttaaataaaatagaagtgtttcaccctctccctcaagtaagtgttggcatccaagatgatatgacaactccacaatcatgaaactagatccctttttattttttggctcagtcattgtcaatgggctgcttccagtcattgtccaaagtggctgcttgcgctccagccactgtatctgcattcgggaaagcaggatggaggaaaggacaaagtaggccatgccctctactttaagataactccttaaattgctgatgtggtgggtcactcctgcaataccagccactcaggaggctgaagcaggaggttcacttgaacccaggagcttgaggctgcagtgaactataattgtgtcactgcattccagcctgagtgacagagtgagatcttgtctcttaacaacaacaaaaaaggtaattctttaaattgtacactttattgctgcttatattccactagaagctagaagttagtcacatggtcttaagtctttattctaacaggtgatgtgcccgagtgaatcctgggggcccagtgctaagaagtagagggagatgaagccctgccctcctgtggagcaaccaggaccttaattcagtcattcattccttggacctacccagattccagcctcaggcccctgcccacctccttgccagtatctctgcagagcctcctgcctcccccagagggtgccagagccctctgcttcctcagccttcagacccacttgctgtgtctcaggtggggacaactcagtctatagaggcccaagggagatctttgagacccatactgtagtcagcttggggcagatgggagtcatgtagctcactggctaaaagcctaggtcctgcatagagctgggttcaaatccaggcatatccatcacctgctctacgatcccaggagtcactcaatgactcagaagctagagtcctctggaaagcttgtatgaagagttcccagggcctggaacatcaaaagagctctgagaatgttggctctgctgttgcttctcttattgggtatctgaaggccgtactctcctctctcctccacccgaggtgacctctactctcatagccacaccctggaccctcactcattcagtcacctcacccagtctgtcatctgtccctctggctctcctctcctgttcatgcatcttgtactcacccacttctgtccctgagtgtttcaaggctctggggttttcagagacactgaagggacctccctcctcaacacaaccacaaggtctaggtggaatgacccactaagggaccggctctgaagccagagacttccagggaaagtcaacaagcccaaggatgcccgttacaagaaagttaaaagacccatgtacatgtcctcccgttttattccctgctcagggtctgggcatacagtggaacacatgcagtccccaaaggacaccgtctgtacagagtcagatggagttaagaacatttagccggctgggcgcggtggctcacgcctgtagtcccagctactcgggaggctgaggcaggagaatggcgtgaacccgggaggcggagcttgcagtgagccgagatcgcgccgctgcactccagcctgggccacagagacagactctgtctcaaaaaaaaaaaaaaagaatatttagtctgggcacggaagcttatgcctgtaatcccagcactttgggaggctgaggtgggcggataacctgaggtcagaagtttgagaccagcctggccaacatggtgaaaccccatctctactaaaaatacaaaaattagccaggcatctgtaatcccagctactcaggaggctgaggcaggaaaatcacttgaacccaggaggtggcggtcacagtgagccaagattgtgccagtgcactccagcctgggtgacagagcaagactccatctaaacacacacacgcacacgcacacatatttaaaccaccacaccaacatctagttcaagatggtggactgagaacttgtctctgccattcctggcccatccaataccactgagagcacagtaagcaaagggaaaaggagacagaagggctgggaacaggatggctgggggatgggaagtatccactgcacaggattttgatttaattctagaagatagaaagagggaggatcacgttcaggaacagatgcgggtaaaggaaaccagagccaaagcacgctgagagaaagctgccccagaggccggagcagaagtggactctctacagggactcaatacaccccaaagggttggtagctggcacacgtacctctccacccccacatgtaacactgcagggcagaggaaataccctaggtgagttccagtatcaatcaacctgccctttgttcataaagatgaattggttaccaggtattaccagacaggtgaggaagaccaacacaaagagaaagatccagaaacaaacaggccaggcgcattggctcacgcctgtaatcccagcactctgggaggccaagatgggtggatcacctgaggtcaggagttcaagaccagccttgccaacatggtgaaaccctgtctctactaaaaatacaaaaattagctgggtgtggtggggttctcctgcctcagcctcccgagtagctgggaggctgaagtaggaggttcacttgaacccaggagctcgaggctgcattgaactatgattatgtcactacattccagcctgagtgacagagtgagatcttgtctcttaacaacaacaaaaaaggtaattctttaaattgcacactacattgctgcttatattccactggctagaggttagtcacatggtctcatgtctttattctaacaggtgatgtgcccgagtaaatcctggggccccagtgctaagaagtagggggagatgaagccctgccctcctgcttgaaccctagaggtagaggttgcagagagcggagatcatgccactgcactccagcctgggtgacagagtgagactccatctcaaaaaataaaaaataaataaataaataaataaataaataaataaaaacctacagcaaagaacaaagagctattgcaccgttactgtgggcctggcagtattatgacaacttttttttttttttttttttttggagatggagtatttttctgtcacccaggctggagtgcagtggctcaatctcagctcactgcaacctctgcctcctgggttcaagcgattctcctgcttcagactcccgagtacctggtattataggcacatcccaccacacccggctaatttttgtatttttagtagagaccgggttacaacatggtttcaccatgttggccagtctagtatcaaactcctgacctcaggtgatccacccgcctcagcctcccaaagtgccaggattacaggcatgagccaccacacccatccagtgttctgacaattttatacttattaactcatttagcaaccctctgagctagatgctattgttatctccacttacaggaaactgagtcacagaatggtacagtaaaataaccttgaccgaggtttacatggctggtaagtggcagagaaatgaaacttgaacccaggcaacctgtttcctgagttggactctgaactactcagccatactgcctatttatttatttatttatttacttacttacttatttattgagatggggtcagccgggcatggtggcttacgcctgtaatcccaccactttgggaggctgaggggaacagatcacttgaggccagcagttcgagaccagcctggacaacaaggagacagggtctcgctctgtcacccaggctggagtgcaatggtgcaatcatggttcactgcagcttcgacctcccaggctcaagcgatcctcccacctcagcctcccaagtagctgggaccataggcacccactatcatgtccagctaatcgaaaaaaaaaaattatatagagatgggggtctcactatattgcctagactggtctctaactcctgggcttaagcaatccacccaccttgccctcccaaagtactagaattacaggtgtgagccaccgtgcctgaccaatacttcctctttaataaactaaacaaaaagtgaacaaaccaatcccggagggaacagataattcaaggaatacaagaaaacttatgaaaagaaagattctagtgccaatatgttcataaaacaaaaaaaaagcagctatgaaaagaaagcaaaaaataattcttggaaatttaaaatagaattgctgaaataaaaagaaattcaatagaaaagggtgtgaacatctgtggttttggtttccaaaattagttcactcttctttgggtaaaaataccctgattttcctgctgtattctcaagccctgtgggttggtggaattgacacctcttccatttactgcacgagagaagcatgttgctgctcacagttcattatgaggagccagcaggtaaagacaacactgagggcagatgaaagatatatactgaccctgggtccttgtggacatcattgagtccctggatcaagccttacctgaagctaaagggatgagtgcttctcactgttaatagccactgatcaaattccatagaaggactccaattatccttgcctcagttgtgtgtccagccctcggatgagctaccatcaagggaaactgccagaccttggtgacaagcccacccactgaaaatggggaaaaaacccaagtcacatcattgaactgaaagagctgcagttccccgaaagacaggagagaaggaatgctggataaacacaacaactacttcatctcactgcacctgcaaagaatccaggcacaggaaggtgggcacagcaagtagtctttctggttgacataacaaagacaacatctgtttcttctctcagaaagaagtaagaaaggcaattggagaaccagaaacgacaaaatctattccaggaccaaatagaaagaaaacacatctgaagcatgattttgaacaattagtggggtgtaagaaaagagaatccatttgaccttgacatctgaaacagcaaatattctccatcaaggcactttagggtagaggaaatgatactatgtttccttctcaaaggagctatctggttacgtggttctgcagtaaatgacgtttatacaatcataacatccgttggttttcaattttcagaatcaacctgaagataaagcatggaagatttcattataattaccgaacagcatgcaaatgttacaaactttgaccatgaaaatgtaaaaaagagcccaggcgcagtggctcacgcctgtaatcctagcactttcggaggccgaggcgggtggatcacaaggtcaggagtttgagaccagcttggccaacatagtgaaaccccatctctactaaaaatacaaacattagctaggcatggtggcacgcacctgtagtcccagctacatgggaggctgaggcaggagaatcacttgaacccaggaggcggagtttgtggtgagccaagatcacgccgcggcactacagcctggtcaacagagcaagactccatctcaaaaaaaagaaaagaaaagaaaagaaaagtagacagcagaaattagagggagatggcaggtgacctggggctgggggaggcacaatttttcttacatagtgatagggctcaagaaattctttctaaaattgatgtatgaggaacgaaattttaaatatagattgtttagaactataagtagcaccaacacaggactccagtaatcacacagcaaacaaaactgagaaaacagacatgggcggggagatgggaatgggtgatttccattccctgctttaatgatgaggtgtcagtagatgctctcttgagttactaaattgagaaacaaagataaagtatattgtttagaggagtgatgttcaaactccagaaaaggctgggcgcggtggctcatacctgtaatcctggcactttgggaggccgaggtgggcagatcacttaagcccaggagtttgagaccagcctaggcaacatgatgaagccctatctctactaaaaaaaaaaaaaatacaaaaaattagcaaagcatggtggtgcacacctgtagtcccagttattcaggatctcactactgtactccagcctgggtaatgagagtgagaccctctctcaaaaaaaaaaaaaaaaaaagaagaagaagaagaaaactccagaatatataaaaatgaaaagagggcggaagagtggaactgcggggtagaaaattttgcattttgtttcatctctctgtatatgttgaactttttttttaacctacatgtactacgtcatatccacagcccccaaccatccaccaggcatcaactgctgtgtttatatggagggttgagcaatcattcctgcctccttccagttcgtcttcctgtactgcagaggctagaaaactaaatttatatcacccagattcccttccagctaccttaatgctaccacctcattcagccatcattgattctccacttcaccaaactggtcaataattgtctcttctaaaaatattagaattgggactaagagacactacagctgacccttaaacaacatgggtttgaactgtgctagtctgcttatacacagatttttaaaaaaataaacatattgaaaaaaattttggagagatgtgacaatttgaaaaaactcacaaaccacatagctagaaatatcaaaaaaaaaaaaactgaaacagagttaggtaggtcaggaatgcataaatatatatgttaattggctgtttatattattagtagggcttccagtcaacagaaggctattagtaattaagtatttgagtcaaaagttatacacagatttttgatgatgaggaggattagtgcccccaacccccatgttgttcaagggttagctatatttgaaatctgctggtagctggaattgggcaactaaattcacgagatgtggaacggtcgtatacatggagaataaataaataaataaataaataaataagtatttgttggcctggtgcagtggctcatacctgtaatcccaacactttgggaggccaaggcaggcagatgacttgaggtcaggagttcgagaccagcctggccaacatggtgaaataccgtctctactaaaaatacaaaaatcagctgggcgtggtggtgtgcacctgtaatcccagctgcttgggaggctgagggatgagaattgcttgaacctgggagtcagaggttgcagtgagccgagattgcaccactgcactccagcctgggcgaaagagtgggactctgtctcaacaacaacaacaaaaaagcaattgttaaaagaataagaaaacaagccacagattgggagaatatatttgcaaaacaaatatctgatgacccaaaatacacaaagaactcttaaaacccaacactaagaaatcaaacaaccccattaaaaaatggacaaacgggccaggcatggtggcggtggctcacatctgtaatgccagcactttgggaggccgagcagggcagatcaccttaggtcaggagttctcaactagcctggccaacatagtgaaaccgtctctactgaaaatacaaaaattagccgaccgtggtgacgtgcatctgtggtcccagctacttgggtgtctgcggcaggaaaatagcttgaaccagggaggttgcaatgagctaagatcgcgccactgcactccagcctgggcaacacagtgagactccgtctcaaaaaaaaaaaatgggcaaaagatgtgaacagacacctcatcaaagaagatatacagatggaagataagcatatgaaaatatgcttaacctgatgtcattaaggaattacaaattgaagcaacaaggtaccactaaacccctattaaaatggtcaaaatccagaatgctaaaaacaccaaatgctggtgaggatgtggagtgacaggactctcattcgttgctggtggaaatgtaaaatggtatggccatttttaagacagtttggcagtttcttacaaaactaaacatagtcttaccatacaatctaacaattacactcctagatagttacccaattgaggtgaaaacttatatccagggccgagcacagtggctcacacctgtaatcccatcactttgggaggccaaagaggaaggattgcttgaggccaggagttctttctttttatttatttatttatttattttcttttgagacagagtttcgctctgtcacccaggctggagtgcagtggagtgatctcatctcactgcaatctctgcctcccggcttcaagcgattctcctgtctcggcctctgagtagctgctgggattacaggtgcacgccaccatgcccagctaatttttatatttttagtagagacagggtttcaccatgtcagctagactggtcttgaactcctgacctcaagtgacctgcctgcctcggtctcccaaagtgctgggattacaggtgtgagctactgtgctcagccaaggccaggagttccagaccagtcctggcaacacagtgatactctgtctctacaaaaaaaaatttttttaattagtcacatgtggtggcacacacttgtagtgtcagctactggggaggctgaggctgaggatcacttgagccccaggagtttgaggttgcagtgagccacgattatgcctctgcactccagcgtgggcaacagagtaagagaaagaaagagagagagagagagagagagaggaaggaaggaaggaaggagaaaagaaacgaaaagaaaagaaggaaggaagggaaggaagggagggaaggaagggaggaaggaaggaagaaagaaagaaaggaaagaaataaaaaaggaaaagaaaagagagagagaaaccttatatccatacaaaaccctgcgcaagaatgtttatagctgctttattcataattgccaaaaactggaagcaactaagaagctctccaatgggtgaaaggataaacaaactgtggtatatctgtgcaatggagtatcattaagtaataaaaagaagacttagcaaaccacaaaaagtaatatgcatactaaatatgcatttagtaatattaatatgcattaagcaataaaaaaagacgtgtcaagccacaaaaagtaatatccatattactaaatgaaagaagccagtctgaaaaggctacgtgctgtgtgatttcaactatttgactttctggaaaaggcaaaactacagacagtaaaaagatcaagggttgccgggggttctggggacaggaaaggatgaataggtggagcacgggaattttaggtcagtgatattattctatatgatactataatggtggatccatgatatgcttttgtcaaaacccatagaaagtacaacacaaagagtgattcttaatgtaaactatgtgctttagtcaacaatgtattgatattagttcattaattttaacaatgtaccacactaatccaagatgttaataatggggaaactgcgtgtgagggaggggatacatgggaactctgtactacagctcaataattttataaatctaaaactttttttttaaataaagtctcttagaaaacaataaaaataaaataaaaagtcaattttttttttttttttgagagggaatcttgctctgtcacccaggctggagtgcagtggcacaatctctgctcactgcaacctctgcctccttagttcaagcgattctcctgcctctacctcccaggttcaatcaattctcccacctcagcctcccaagtagctgggactacaggcatgcgccaccacgcctggctaatgtttgtatttttagtagagatggggtttcgccatgttggccaggctggtcaagaactcctgacctcaggtgatccgcccgcctcagcctttcaaagtgctgggattacagggttgaaccacatgcctggtctaaaatgtccatttttaaaaggcagtctggctggggcagtggctcacgcctgtaatcccagcaccatgggagaaggctgagcagggtgtatctcttgagcccaggagttcgaggctgtagtgtgctatgatggtgccactgcactccagcctgggtgacagagtgagactctgtctctaaaataaataaataaaaatacaataaaattttaaaaggcaatctgcagcaagagaagatgaagttagcaggagagcaggacagaggagagtccatgaacaacagggagaggaaagtggtcatggtggcagctcccaggctcctggcatatgttcaattccctgttcccagccctcaggaagcccagatgtccccacctgcccctacatacaaaccctggatccttgacatcaacttctcctttccttcatgtgctctaatgagtttttgttacttgtggaacatttaactaacatcattaaccaagtggacctgtctcagagtggtgttatgagaagacagcagccaaaagacagctgcagccaagcacagtggctcatgcctgtaatcctagcattttgggaggccgaggtgggtggatcacctgaggtcaggagttcgagaccagcatggccaacatggcgaaaccccctctccactaaaaatataaaaattagccgggtgtggtggcgagcgcctataatcccagctacttgggaggttgaggcaggagaattgcttgaacccagggggcagaggtggcagtgagccgggatcatgccacttcactccagcctgggtgaaagagcaaaactctgtctcaaaaaaaaaaaaaaaaaaagacagctgcaacaaatgtcaagttctgtgtgttttcttttcttttcttttttttctatttaattaatttattttagagtcagagcctccctatgtcacccaggctggagtgcagtggcacagtcacagctcactgtagcctcaacctcctgggctcaggcgatccttccacctcagcctccttcctagctgggactacaggtgtgtgccacgacatctggcttgtgtgttttcttttctttttttttgagacggagtcttgctctgccacccaggctggagtgcagtggcgcgatcttggctcactgcaacctctgcctcctgggctcaagcaattctcctgcctccgcctcctgagtagctgggaatacaggcgcacaccaccatgcccagctaatttttgtatttttagtagagacggggtttcaccatgttggccaggatggtctcgatctcctgaccttgtgatccacctgactcggcatcccaaagtgctgggattacaggcgtgagccactgcaccctgcctggcttgcatgttttctgacatactgtcaaaaggatactcatactaaatggcaacacattctcaagccccttccttttcttctcctatctgctttaccacacaccatagctgcttttaccgttttctccttaaaaactcaaaaaaaccttcccccaacctatctatccacttcttgtcctcccctcaaacccactccattttgattctgcatcataaaaaccaagcagagttctggggaggcagaagcctcctcttatgatattggaagggggtggatgaaattgagcacacaaagccagaatcctcttttgtggaaagatgggggcagtgggcagagggaagcaggctcatctctttccctctcttcccttcccttctctttcacaccacacgctccgcctgggtgagctcatcgtcctcgtgtcttcaatttccacctccaggagatcgactgccaaatttctacccgcaatcccaaactccactctgagctccagacccatctactaattgcctagtcaacattttctctgtgggatcgaatcagataggattatattctgctgtgactaacagagactgaaaattcagagtcctaaacaaaagactttctttttcttgtgctgaaaagtctggaagtacacagccctaggctggaatagggatactgctggggggctccgcctccttgcaggctgcccctctgctatctccagggtgtgtccctcaaccacactgtccaaagtggtgactgaaggaccagtcctcccactgacattccaggcaacagaatggagaagaacaggctgaggaaggaggaaccacaggcgccctccagctgtttcaaggaaggttcctggaagatgctaaataacaattccgtttatatctcattagccaggcttagtcacgtggcaacacctagaagcaagaaaggctgggaaatatactgtttctgctgggttaccgtatgcatgactaaaaagagagcgctctgttcttaggaaaatgagaatagactgggttgggggaggataaccagcattggctacactgcagccccacaacctcctcatgcttgatgtggctgaaataaaaagagcatctccccctaacatttcctttcccttagtcttgttccttttctgtaccccataccctagcagaggggcaattctgtggggtgggctcactggcaaggggaggtctcacccaagctcagtcaagggtgagcagagagaattgtacaaggaagctgaatttccagctggtctggaggaaacactgaaaaccccaaacagaagatgtccaggtggagcaaatgcagctgagagttcttgtccaaggggacagaatgtcagcagagtaggacacaagggcaggtctctactgaaagcaccaggggcaaagtcacccagcccttcaaccggctggccaccaagcacatcggctccactctgcctcctgcccgtgccaccctttgcacttttgtctgtaccatctcctccaccaggagtgcccttcccgctcctccatgtggtatactctcagccacccctcaggctcagatccagagccacctcctccaagaagtctccacctgtctgctgggaaccctcacatcacactgggagacgaagccaaaagtgggggggtcagtacagaggtgtgggaggtaggtccaatcctggctggacctggctttgggtgccatttgggacagggtattggggaggttcagcaggaaggtgggacctcaaggctttctttttatgaaggaggaggaaccagctgttgacagagcagcaacagcagggagccaccaaggctgagccttgaaccctgggccaccaggctcctgcaggcaactgggagcagctcagcctctcacagtcccatttccagggaggaagatgatgcagcctgaggcaattggccacctggaggaagttcagctgggtggggcaggcagaggaattcctggaaggaagctcacccctcagcactggggtagagggacactagagacaggggtggcccaggagctgcccacctcctatccccatgaataagcaggtgggcccgggtgaccagctgggagccacccctgggtgctcaggtaccatgcttctggcccagcctcctgagctgtggcacaggcaagagcaccggcccacggggtctgcatggggcagtgacctgttctctctaagcttcagctttctcatctgtagaaagagggtgaagagtccttccccaccatggttgtggtgagggtaactgaagtgtcagggtaggggacccagtggggcaccagcacacctgaggttcagtcaacaaggcccactggtgaagaaaacctcgcccaccctcccgtccctcctgaggcaggtggtggaggcacatgccctctccattgtgtgtgcatgagtgtgtgggtgcatgcatgtgtgtgcatgcaagtgtgtgtgcatgtgtgtgcatgcatgtgtgtgcgaatgtgtgtgtgtgcgcacatgcatgtgtgctaagctctggagaacaagcagccaggcttgggcaggagtccgggggcaagggggggacatgcaaagttctctccacagcccctcagtgctaacaggctgaggtgggggatgacatgtcttagaaacaaacttcaccctctgccctaaaactgcctgctggtctgccacatcgggccaagctgtgggtacttggaaagagggccctgctcctgccttccaaacccaggaagtcttgaaatccccatggaggggacctggggccaggggactccccaagcagacacagcacccacacaagggtctaagggacccctttctccccaaccgcctgaggtagggatggatgtggacaagcagctcagggctggggctggcctaggtggaaggttcagaagcacagaaggcaggacgtgcccaaggggctggacatggggttggaggctaggggctggaaaaagagtttgggaggtcagccaagggcagtccacgccttggctcttctctgggtcatggggagccacggagagtataggagtggtgatgggatggccccagagttgtgcctttgaaagtcacctctggttgcagatagagatggactgggggcagggctgagaggaagggcatctcatgagaggggaaatccctgaccacagtccagaggaaaacagcgggcctggggagaggctgctcctggggaggacctactcagaggctgattcttcctcgtgctaccccacccagggagatgcaggaagctggtgaggtcagtgggtgggcccacaaccatgctggagaggagcaggagggagacgggagggcacagagaggtagagggcagggactctgaggaccctcatccatgcccacctggacaattgaatcgagcttcctctagtgtggaatgtgggctcactggggctatttgctatccttctctcatgtcagactggatgcggcccaagggtggggtctgtgactccctcatcagactgaggggggccgaaatgtgggggtgggggaaggagggagcttccaaacaggaaggtttggagggcgctggcactgaggacaggggatacgccccccatgagtcttcacccctgctcagagcctgctgccgtggccctcagagacgagcccatctttggagctggagttggggacagggaaaccaggtggaagggaaaaagaaaaaaggggcaggcatgagtgtgaggggccagaccctgcagaccccaggacatgcacagcagacacacactccaatccctcctggctctgctcagcctcaaacgaggtgcaggcctgcaggccccaaccaaggacccctgttacacacagacacaaagacacaagatgcagcaacacacacacgtaatacagaaacacagtcacacactagcgcacacacagacacagtcagacaatccaagaaacacactcacacatgaacagacatataagcaaagtcttacacatacaaagacacacttaagcacagacacaaacacaccaacagatgcacagacggacacacatagacgcacactgggaggcggcctgtggagactgctgattggataccatgttggcttggtatccagaattgttggtgcagcgcactcaccatgcctgacctcattaaggaggccctctggggcagtggctctgagaagaaaggcagcaagcctagggaggtgacactgtagctggggagcattttggctgggcagagaggaggaaggagagcatttcagggagggaaaatagcccttgcaaaggtttggagtggaagagcaaaagggatgtcccaagaactgtgcctcatttgatggggctgtggggcccttctctgacgggcagccttcccaggcacaaagggaggtggactgagaagcatctggaacttctgtgggggcacatggggcagaggggaaggggaacaggcagaacgagtcagctgcctttgaaagctccacgagggacctagcagaaattcattcattcatccgttcattcatttatttatgacaggttctctctctgtcacccaagctggagtgcggtggtgtgatcacacttactgcagcctcaaactcttgggctcaagcaatcctccaccccagcctcctgagtacctaggactacagacgtgagctactacacctggctaatttttaaaactttttagagacagggtctccctttgttgcccaggctggtctttgttgcccagccagcttcaagccatcctcccacctcagactcccaaagcgctggattacaggcatgagccacgggttcccagcccagaaagagaccttcaccccacaaaccccctgtctggaggccaagtcccagcatccccagaagggccccggttaggacaagaaaaaggctgtgtgcctcggaggagaggctgggtgccccctggtgcggagtggtccccttgccgggcatggggcctcagtctgtgagactccgcgcctccgtcgtctgaacttgagcaaagacagagctaggcctagcctggggacccgagggcctgccctcatccgcaattctgcctcttttctggccactgaggaccgggctagggaagctgtaggggcagtaggggtgggaggagagagggttccgggtcaagggactggaggggtctggggcagggaagtggaggggtctagggcgggcccttccccctccgctgttgggccctcgctgaaggggccgaggctgagccccaaggtgggcctgtgggggcggggcgggggagcccctcagcagctggaccgcaggaggccgaccagggtctggaactcctcttcccctccctccgccgccccctctcccttctccca

SEQ ID NO: 647 - DNA, 2315 bp, Homo sapiens
aggcctctggggctggccacagaaaccccgttggttagagcacagtgtgggatgaggtgaccctcagtgcacgacttggggtgacccctgcccccatcctgagacagttacccctccccctctgccatcagcacattctgtagcctcttgggttacttggctgccttggtgtcccattttcttgggggtggggtggggattccctatccaggatgggggggccctcagggctctgttcccagaggctgagttagagcgatggggaagggggggggcagttttggggagagacaggcagtgctggctttgctcaccagggcctggacactaaatcccttgttgatggctgtggcaacccctccctagggtagggttaccatcttcggccctgtccccttgactctctcccctcacttccccttgtccctctaggagccactcacttcctctagcccccaaaagatgttctcccttcatcagtcccccaaaggcttggggtatctctgccactgcttcagcaaatggggtgaggaggaaggagactgcggcaatggaaacaggctccgggcagatgaggcaggaaggggggtgtgaggaaagggacaggtgaggccggggatggaagagggctcagggaagaactggggggatgagtttggaatgggaaattcaatgcagctggggaagtcgaggcaatgggggggcagggtcagtagcagatgacagaaagtgaagtctctccctaccccacttccctggggctggggctacctttgcgtccctcatgagtgacatctcaggctgcagccccactgttccccctctgtcagcagaaatatctctctttttctgacccctcctgctggagtctcagccagccaatccctgatctggtggaggggggagcccggcctccccctgctccctcataaggaccagctgggggccggggggtggccggctgctcaagtgggacgggggtcagagctttgtggagggaagaaaaacctggagggggcaggagagtaaaaagaagaaacccaggcagacaggcagttggacacactgaggaagaccccccacgagtgggaaccccctggaaggaacacaccggccccggcccccaggaagggagcacaatggaggccgctcatgctaaaaccacggaggaatgtttggcctattttggggtgagtgagaccacgggcctcaccccggaccaagttaagcggaatctggagaaatacggcctcaatggtaagtgtcccttggaagagagctggtaattaatgccctcctgcacccccaaaacacacgcacagccatgcacgcgtttctccttcagggtttcttaaggaagagctgggccgttgtccaatgctcgcagggggaagaagatactgagaaaacagagtcccgagatccagagttttgggaggttttaatgggatgaacttgatgaacctcaaggtggcctgattctcttagccacaaagtcttgggtgtggggggcatgaggctgaaccccaaatgaatctgtccttttcttctttttcctgggtagagctccctgctgaggaaggtaagttactggaatccctgaactctcataaatgaccaccccccaccccgccctgtcccactccctcctccctgcctctttagattctttgagcaaatatcccttcccaaaaggcaaatctccctccctaaaggttagagtcctgtccggggcagaagtctcccaggaggcgctttctccttgaagcagccaacccttgaactgccccccactttgccgagtctgtttctggactccaggcgagcttcttagcccttctctgggcaccaagctgtctgcccaccaccctagagcctccccactgcagccgagtccaggcgctccatcccagaccttcacccactagaccttaaccgggccctccccttgcctctccccagggaagaccctgtgggagctggtgatagagcagtttgaagacctcctggtgcggattctcctcctggccgcatgcatttccttcgtaagtgtgggagggtctctgggggctggctgggggtgtgaggctgggatcgggcgaatgcggggctcgcagtcactggatcctcccgtccgagtcccgagcatcccattgtacagactggggcgggctggcggccagcagcgggtgtgattcgcgtcctcctctctcctcccctgcaccccagaggcaggttttattttaagctttaagggtgttctcagccaaaacaccgaagctaagccaccctcgcggcttcaagagcttggagct

SEQ ID NO: 648 - DNA, 738 bp, Homo sapiens; identical to SEQ ID NO: 16

SEQ ID NO: 649 - DNA, 8684 bp, Homo sapiens
gagctgccacttttcaccgttagaagtagagctttttccagacctcctaccttttagtctactttgaaaggtgaaagaaagaacatcgtttcaggaataaaaatgcacagtagtagttatagttaccgtagcagtgattctgtgtttagtaacactaccagcactcgaaccagtcttgattcaaatgaaaatcttctcttggttcattgtggtccaacactgatcaactcttgcattagcttcggtagtgaatcctttgatggacacaggttagaaatgttgcaacagattgccaacagagttcagagggacagtgtcatctgtgaagacaaactgattcttgctggaaatgctcttcagtctgattctaaaagattagaatcaggagtgcagtttcagaatgaagcagaaattgctgggtatatacttgaatgtgagaaccttttacgccagcatgtaattgatgtacagattcttattgatggaaaatactaccaggcagatcaattggtacagagggttgcaaaactgcgtgacgaaattatggccttaaggaacgaatgttcttctgtgtacagcaaaggacgcatactgacaacagaacagacaaagctcatgatatcaggaatcactcaaagtttaaactcaggatttgcacagaccttacaccctagtctgacctcagggctgacccagagtttaacaccttccctaacctcttctagtatgacttctggcctgtcatcagggatgacttcccgcctgactccatctgtcactccagcttatacacctggtttcccatcaggattagttccaaatttcagttcaggagtagagccaaattcattgcaaactttgaagttgatgcagatccgaaaaccccttctaaagtcttctttgctggatcaaaatttaacagaagaagaaatcaatatgaaatttgttcaggatcttttgaattgggttgatgagatgcaggtacaactggaccgcactgagtggggctcagatttgccaagtgttgaaagccatttagaaaatcataaaaatgttcatagagctattgaagaatttgaatctagtctcaaagaagctaaaatcagtgagattcaaatgacagcacctcttaaactgacttatgcagaaaagttgcacagattagagagtcagtatgcaaaactcttgaatacatccaggaatcaagaacggcaccttgatacactccataattttgtaagtcgtgcgactaatgaacttatttggttgaatgaaaaagaagaggaggaagttgcttatgactggagtgagagaaacaccaacatagctaggaaaaaagattatcatgctgaattaatgagagaacttgatcaaaaggaagaaaatattaaatcagttcaggagatagcagagcagctacttctagaaaatcatccagcccggttaactattgaggcctacagagcggcaatgcagacgcagtggagctggatcttacagctctgccagtgtgtggagcagcacataaaggagaacacagcgtatttcgagtttttcaatgatgccaaagaagctactgattacttaaggaatctaaaagatgccattcagcggaagtacagctgtgatagatcaagcagcattcacaagctagaagaccttgttcaggaatcaatggaagagaaagaagaacttctgcagtacaaaagcactatagcaaacctaatgggaaaagcaaaaacaataattcaactgaagccaaggaattctgactgtccactcaaaacttctattccgatcaaagctatctgtgactacagacaaattgagataaccatttacaaagacgatgaatgtgttttggcgaataactctcatcgtgctaaatggaaggtcattagtcctactgggaatgaggctatggtcccatctgtgtgcttcaccgttcctccaccaaacaaagaagcggtggaccttgccaacagaattgagcaacagtatcagaatgtcctgactctttggcatgagtctcacataaacatgaagagtgtagtatcctggcattatctcatcaatgaaattgatagaattcgagctagcaatgtggcttcaataaagacaatgctacctggtgaacatcagcaagttctaagtaatctacaatctcgttttgaagattttctggaagatagccaggaatcccaagtcttttcaggctcagatataacacaactggaaaaggaggttaatgtatgtaagcagtattatcaagaacttcttaaatctgcagaaagagaggagcaagaggaatcagtttataatctctacatctctgaagttcgaaacattagacttcggttagagaactgtgaagatcggctgattagacagattcgaactcccctggaaagagatgatttgcatgaaagtgtgttcagaatcacagaacaggagaaactaaagaaagagctggaacgacttaaagatgatttgggaacaatcacaaataagtgtgaggagtttttcagtcaagcagcagcctcttcatcagtccctaccctacgatcagagcttaatgtggtccttcagaacatgaaccaagtctattctatgtcttccacttacatagataagttgaaaactgttaacttggtgttaaaaaacactcaagctgcagaagccctcgtaaaactctatgaaactaaactgtgtgaagaagaagcagttatagctgacaagaataatattgagaatctaataagtactttaaagcaatggagatctgaagtagatgaaaagagacaggtattccatgccttagaggatgagttgcagaaagctaaagccatcagtgatgaaatgtttaaaacgtataaagaacgggaccttgattttgactggcacaaagaaaaagcagatcaattagttgaaaggtggcaaaatgttcatgtgcagattgacaacaggttacgggacttagagggcattggcaaatcactgaagtactacagagacacttaccatcctttagatgattggatccagcaggttgaaactactcagagaaagattcaggaaaatcagcctgaaaatagtaaaaccctagccacacagttgaatcaacagaagatgctggtgtccgaaatagaaatgaaacagagcaaaatggacgagtgtcaaaaatatgcagaacagtactcagctacagtgaaggactatgaattacaaacaatgacctaccgggccatggtagattcacaacaaaaatctccagtgaaacgccgaagaatgcagagttcagcagatctcattattcaagagttcatggacctaaggactcgatatactgccctggtcactctcatgacacaatatattaaatttgctggtgattcattgaagaggctggaagaggaggagattaaaaggtgtaaggagacttctgaacatggggcatattcagatctgcttcagcgtcagaaggcaacagtgcttgagaatagcaaacttacaggaaagataagtgagttggaaagaatggtagctgaactaaagaaacaaaagtcccgagtagaggaagaacttccgaaggtcagggaggctgcagaaaatgaattgagaaagcagcagagaaatgtagaagatatctctctgcagaagataagggctgaaagtgaagccaagcagtaccgcagggaacttgaaaccattgtgagagagaaggaagccgctgaaagagaactggagcgggtgaggcagctcaccatagaggccgaggctaaaagagctgccgtggaagagaacctcctgaattttcgcaatcagttggaggaaaacacctttaccagacgaacactggaagatcatcttaaaagaaaagatttaagtctcaatgatttggagcaacaaaaaaataaattaatggaagaattaagaagaaagagagacaatgaggaagaactcttgaagctgataaagcagatggaaaaagaccttgcatttcagaaacaggtagcagagaaacagttgaaagaaaagcagaaaattgaattggaagcaagaagaaaaataactgaaattcagtatacatgtagagaaaatgcattgccagtgtgtccgatcacacaggctacatcatgcagggcagtaacgggtctccagcaagaacatgacaagcagaaagcagaagaactcaaacagcaggtagatgaactaacagctgccaatagaaaggctgaacaagacatgagagagctgacatatgaacttaatgccctccagcttgaaaaaacgtcatctgaggaaaaggctcgtttgctaaaagataaactagatgaaacaaataatacactcagatgccttaagttggagctggaaaggaaggatcaggcggagaaagggtattctcaacaactcagagagcttggtaggcaattgaatcaaaccacaggtaaagctgaagaagccatgcaagaagctagtgatctcaagaaaataaagcgcaattatcagttagaattagaatctcttaatcatgaaaaagggaaactacaaagagaagtagacagaatcacaagggcacatgctgtagctgagaagaatattcagcatttaaattcacaaattcattcttttcgagatgagaaagaattagaaagactacaaatctgccagagaaaatcagatcatctaaaagaacaatttgagaaaagccatgagcagttgcttcaaaatatcaaagctgaaaaagaaaataatgataaaatccaaaggctcaatgaagaattggagaaaagtaatgagtgtgcagagatgctaaaacaaaaagtagaggagcttactaggcagaataatgaaaccaaattaatgatgcagagaattcaggcagaatcagagaatatagttttagagaaacaaactatccagcaaagatgtgaagcactgaaaattcaggcagatggttttaaagatcagctacgcagcacaaatgaacacttgcataaacagacaaaaacagagcaggattttcaaagaaaaattaaatgcctagaagaagacctggcgaaaagtcaaaatttggtaagtgaatttaagcaaaagtgtgaccaacagaacattatcatccagaataccaagaaagaagttagaaatctgaatgcggaactgaatgcttccaaagaagagaagcgacgcggggagcagaaagttcagctacaacaagctcaggtgcaagagttaaataacaggttgaaaaaagtacaagacgaattacacttaaagaccatagaggagcagatgacccacagaaagatggttctgtttcaggaagaatctggtaaattcaaacaatcagcagaggagtttcggaagaagatggaaaaattaatggagtccaaagtcatcactgaaaatgatatttcaggcattaggcttgactttgtgtctcttcaacaagaaaactctagagcccaagaaaatgctaagctttgtgaaacaaacattaaagaacttgaaagacagcttcaacagtatcgtgaacaaatgcagcaagggcagcacatggaagcaaatcattaccaaaaatgtcagaaacttgaggatgagctgatagcccagaagcgtgaggttgaaaacctgaagcaaaaaatggaccaacagatcaaagagcatgaacatcaattagttttgctccagtgtgaaattcaaaaaaagagcacagccaaagactgtaccttcaaaccagattttgagatgacagtgaaggagtgccagcactctggagagctgtcctctagaaacactggacaccttcacccaacacccagatcccctctgttgagatggactcaagaaccacagccattggaagagaagtggcagcatcgggttgttgaacagatacccaaagaagtccaattccagccaccaggggctccactcgagaaagagaaaagccagcagtgttactctgagtacttttctcagacaagcaccgagttacagataacttttgatgagacaaaccccattacaagactgtctgaaattgagaagataagagaccaagccctgaacaattctagaccacctgttaggtatcaagataacgcatgtgaaatggaactggtgaaggttttgacacccttagagatagctaagaacaagcagtatgatatgcatacagaagtcacaacattaaaacaagaaaagaacccagttcccagtgctgaagaatggatgcttgaagggtgcagagcatctggtggactcaagaaaggggatttccttaagaagggcttagaaccagagaccttccagaactttgatggtgatcatgcatgttcagtcagggatgatgaatttaaattccaagggcttaggcacactgtgactgccaggcagttggtggaagctaagcttctggacatgagaacaattgagcagctgcgactcggtcttaagactgttgaagaagttcagaaaactcttaacaagtttctgacgaaagccacctcaattgcagggctttacctagaatctacaaaagaaaagatttcatttgcctcagcggccgagagaatcataatagacaaaatggtggctttggcatttttagaagctcaggctgcaacaggttttataattgatcccatttcaggtcagacatattctgttgaagatgcagttcttaaaggagttgttgaccccgaattcagaattaggcttcttgaggcagagaaggcagctgtgggatattcttattcttctaagacattgtcagtgtttcaagctatggaaaatagaatgcttgacagacaaaaaggtaaacatatcttggaagcccagattgccagtgggggtgtcattgaccctgtgagaggcattcgtgttcctccagaaattgctctgcagcaggggttgttgaataatgccatcttacagtttttacatgagccatccagcaacacaagagttttccctaatcccaataacaagcaagctctgtattactcagaattactgcgaatgtgtgtatttgatgtagagtcccaatgctttctgtttccatttggggagaggaacatttccaatctcaatgtcaagaaaacacatagaatttctgtagtagatactaaaacaggatcagaattgaccgtgtatgaggctttccagagaaacctgattgagaaaagtatatatcttgaactttcagggcagcaatatcagtggaaggaagctatgttttttgaatcctatgggcattcttctcatatgctgactgatactaaaacaggattacacttcaatattaatgaggctatagagcagggaacaattgacaaagccttggtcaaaaagtatcaggaaggcctcatcacacttacagaacttgctgattctttgctgagccggttagtccccaagaaagatttgcacagtcctgttgcagggtattggctgactgctagtggggaaaggatctctgtactaaaagcctcccgtagaaatttggttgatcggattactgccctccgatgccttgaagcccaagtcagtacagggggcataattgatcctcttactggcaaaaagtaccgggtggccgaagctttgcatagaggcctggttgatgaggggtttgcccagcagctgcgacagtgtgaattagtaatcacagggattggccatcccatcactaacaaaatgatgtcagtggtggaagctgtgaatgcaaatattataaataaggaaatgggaatccgatgtttggaatttcagtacttgacaggagggttgatagagccacaggttcactctcggttatcaatagaagaggctctccaagtaggtattatagatgtcctcattgccacaaaactcaaagatcaaaagtcatatgtcagaaatataatatgccctcagacaaaaagaaagttgacatataaagaagccttagaaaaagctgattttgatttccacacaggacttaaactgttagaagtatctgagcccctgatgacaggaatttctagcctctactattcttcctaatgggacatgtttaaataactgtgcaaggggtgatgcaggctggttcatgccactttttcagagtatgatgatatcggctacatatgcagtctgtgaattatgtaacatactctatttcttgagggctgcaaattgctaagtgctcaaaatagagtaagttttaaattgaaaattacataagatttaatgcccttcaaatggtttcatttagccttgagaatggttttttgaaacttggccacactaaaatgtttttttttttttacgtagaatgtgggataaacttgatgaactccaagttcacagtgtcatttcttcagaactccccttcattgaatagtgatcatttattaaatgataaattgcactcgctgaaagagcacgtcatgaagcaccatggaatcaaagagaaagatataaattcgttcccacagccttcaagctgcagtgttttagattgcttcaaaaaatgaaaaagttttgcctttttcgatatagtgaccttctttgcatattaaaatgtttaccacaatgtcccatttctagttaagtcttcgcacttgaaagctaacattatgaatattatgtgttggaggaggggaaggattttcttcattctgtgtattttccgg

SEQ ID NO: 650 - DNA, 2036 bp, Homo sapiens; identical to SEQ ID NO: 18

SEQ ID NO: 651 - DNA, 887 bp, Homo sapiens; identical to SEQ ID NO: 19

SEQ ID NO: 652 - DNA, 1505 bp, Homo sapiens; identical to SEQ ID NO: 21

SEQ ID NO: 653 - DNA, 979 bp, Homo sapiens
gaattcctagagactggctgaagccagacagagggagtatgaggagggggcagagaatcttcagaaagacattccgaagtctcgggcctagaaaatgtttagaaatattggttcctgtgttcccctccagtctgtctacctgaatgggaaactggtggtggggccaggcatacttctttttgaacaaatacacagttaattctgagatgccaccttgattgagaagcactgtccttttctaagcaaaaatcattgccaaattaccctagaatccaccactgctcacagatctgtgcctgaaccaacttggttttgaagttttcttttgtttcacaaaactagtttagggtgggctgtgagaggaagcttctaaaaagcaactgggaagtactaaatctctgagactaaagagggcggactcagcctcacttcctccttcttctcatctgggcttcctgtcgtcacagcatgatcatattttttcacccttcacttctccttttacacaaatagccccggatatctgtgttaccagccttgtctcggccacctcaaggataatcactaaattctgccgaaaggactgaggaacggtgcctggaaaaggtaaggttgatgacgttttaacttggcttgctgtctaatgtggggtagggcgtattcttaggggtctccatatacctctctagtaaccataaaatctccggcaacttctctttcacaaatatttagtgcacaaagtaaaacagattagcaagatcctagtaacatccccaaaggcaatcaggccagaaatacttttacttaatcaggttcccattatctaaacctctgagtcgaggcattcacatgccttaattgcttcagagcttgaattactctgtgtagtaattcctgatagccctggagcttctatgcgagatgacattggggagatttcctatgtgctctggtcttcagaaaattggctgtgatttaa

SEQ ID NO: 654 - DNA, 4910 bp, Homo sapiens; identical to SEQ ID NO: 23

SEQ ID NO: 655 - DNA, 3597 bp, Homo sapiens; identical to SEQ ID NO: 24

SEQ ID NO: 656 - DNA, 1722 bp, Homo sapiens; identical to SEQ ID NO: 25

SEQ ID NO: 657 - DNA, 2232 bp, Homo sapiens
ggattgaacaaggacgcatttccccagtacatccacaacatgctgtccacatctcgttctcggtttatcagaaataccaacgagagcggtgaagaagtcaccaccttttttgattatgattacggtgctccctgtcataaatttgacgtgaagcaaattggggcccaactcctgcctccgctctactcgctggtgttcatctttggttttgtgggcaacatgctggtcgtcctcatcttaataaactgcaaaaagctgaagtgcttgactgacatttacctgctcaacctggccatctctgatctgctttttcttattactctcccattgtgggctcactctgctgcaaatgagtgggtctttgggaatgcaatgtgcaaattattcacagggctgtatcacatcggttattttggcggaatcttcttcatcatcctcctgacaatcgatagatacctggctattgtccatgctgtgtttgctttaaaagccaggacggtcacctttggggtggtgacaagtgtgatcacctggttggtggctgtgtttgcttctgtcccaggaatcatctttactaaatgccagaaagaagattctgtttatgtctgtggcccttattttccacgaggatggaataatttccacacaataatgaggaacattttggggctggtcctgccgctgctcatcatggtcatctgctactcgggaatcctgaaaaccctgcttcggtgtcgaaacgagaagaagaggcatagggcagtgagagtcatcttcaccatcatgattgtttactttctcttctggactccctataacattgtcattctcctgaacaccttccaggaattcttcggcctgagtaactgtgaaagcaccagtcaactggaccaagccacgcaggtgacagagactcttgggatgactcactgctgcatcaatcccatcatctatgccttcgttggggagaagttcagaagcctttttcacatagctcttggctgtaggattgccccactccaaaaaccagtgtgtggaggtccaggagtgagaccaggaaagaatgtgaaagtgactacacaaggactcctcgatggtcgtggaaaaggaaagtcaattggcagagcccctgaagccagtcttcaggacaaagaaggagcctagagacagaaatgacagatctctgctttggaaatcacacgtctggcttcacagatgtgtgattcacagtgtgaatcttggtgtctacgttaccaggcaggaaggctgagaggagagagactccagctgggttggaaaacagtattttccaaactaccttccagttcctcatttttgaatacaggcatagagttcagactttttttaaatagtaaaaataaaattaaagctgaaaactgcaacttgtaaatgtggtaaagagttagtttgagttgctatcatgtcaaacgtgaaaatgctgtattagtcacagagataattctagctttgagcttaagaattttgagcaggtggtatgtttgggagactgctgagtcaacccaatagttgttgattggcaggagttggaagtgtgtgatctgtgggcacattagcctatgtgcatgcagcatctaagtaatgatgtcgtttgaatcacagtatacgctccatcgctgtcatctcagctggatctccattctctcaggcttgctgccaaaagccttttgtgttttgttttgtatcattatgaagtcatgcgtttaatcacattcgagtgtttcagtgcttcgcagatgtccttgatgctcatattgttccctaatttgccagtgggaactcctaaatcaaattggcttctaatcaaagcttttaaaccctattggtaaagaatggaaggtggagaagctccctgaagtaagcaaagactttcctcttagtcgagccaagttaagaatgttcttatgttgcccagtgtgtttctgatctgatgcaagcaagaaacactgggcttctagaaccaggcaacttgggaactagactcccaagctggactatggctctactttcaggccacatggctaaagaaggtttcagaaagaagtggggacagagcagaactttcaccttcatatatttgtatgatcctaatgaatgcataaaatgttaagttgatggtgatgaaatgtaaatactgtttttaacaactatgatttggaaaataaatcaatgctataactatgttgataaaag

SEQ ID NO: 658 - DNA, 604 bp, Homo sapiens
aatgacactaaagcatgtagcaggcctatagaatgagcatactgtcaaaggcattaagtggaaaaccctccctgctctggaggcggggattggttctacaaagcctcctgtcatgccagtggccaactagagaagttggagctttttgattatttttttttttttcctcctgtgacatgtgcctttagttgcagtggaaagaaatgtgtcatctgtggtttggtttttaaaagtggaaaactagctgcacatatccttttttactgcagatttactttaaggctcatattctccaagtctattctgctttaaaaagaagacaagaaaagaagtggtttatcaaaatcacgttataatcagattttgaccaagcattttgtaaggtaggtcatatatatacggcttttcttatgccttttcacttctaacgtctgacagattagtgttcgaggaaatgctatcaaagtgtgtaagaatctcactaacaaactagaattgtgactgaaaatgtatactttttttttctgtcctgttacataaattttaagttagaaatgaaaaaatttgccatcgccatggagttttaaattaggattacgaagga

SEQ ID NO: 659 - DNA, 1367 bp, Homo sapiens; identical to SEQ ID NO: 28

SEQ ID NO: 660 - DNA, 3597 bp, Homo sapiens; identical to SEQ ID NO: 24

SEQ ID NO: 661 - DNA, 2776 bp, Homo sapiens; identical to SEQ ID NO: 30

SEQ ID NO: 662 - DNA, 1395 bp, Homo sapiens; identical to SEQ ID NO: 31

SEQ ID NO: 663 - DNA, 173 bp, Homo sapiens
  misc_feature 166: n = A,T,C or G
atcccctacactgttgtcctactgcagctatttcaaggcgcgcgcctcgtggtggactcaccgctagcccgcagcgctcggcttcctggtaattcttcacctcttttctcagctccctgcagcatgggtgctgggccctccttgctgctcgccgccctcctgctgnttctctc

SEQ ID NO: 664 - DNA, 2580 bp, Homo sapiens
aagcttccttggaattaatggtcagataaggagctctagcaatatcactttaaatgcttaatatacaatatttagaaaaccttatgattgtaaagagcttaaaaaagatgtgaaagaacaatcactaaargcattgacaacatatgtgtgttagtgaacaatatgtaccaaaatggacagatgagaggtgtacattggggtgtgagttgataatccagcagactgtgggactagagggtctacgaaaaacaaaggaagaacatacaaacaaattttaaaacactgtctttcaacactaaaactgttggaatagagagcaagaatacatattggattcacattcagtttatttctcagattcagactagtgctctgactctgcactctgcaacctactctaatattacatatgataacatgagtctatgcagctgttctctatagatattcacagacactacagaatgttttggagattatgtaatatttaaaatattcaaattatactaaaaatgtatgtaaaatgtattgaacataggcaagtttcaatacatagattttgagtgaatgcttgcaactttggttccattctctctacttccttaaggtggtgtccaagagtacatttttataaataaaaagttatagtacactcctaagggcagcaagtagaaaacgtgctagggagactcgatctcactttggaatctatcctgggagacaaatgcctctacaaatggattagagaagacagttttaaagaggaagataatcaggtaaaatctggggttttatgagagaaagaaagaggtagaagaaaaaatttcaagctcgaacatcggatcaggtggcacaatgcggtcaatgcctgcaaactcagggtaagtattattctccctgtttacagttccgtggaggagaagtgacttgcctgtggtcatacaacagagcaaagaaaaggcttgagctagaactcaggcctttgttaggtctccccttcctcctagcacattggcaaattgcatgaggaaagtagaggtacagttgagttcatgtacaacaataaggcattcaggtaaagtgaatgagggcagaagttttatgatttagggaaggtgtaagacaggaaaatatctttgttcccaattaagaaagagatcccttgaccatcagttagagattcccccaagtccctctttgccataagtcactgaaactgagatccaaggcatggcttctgtgagtcaggagagcttaacccagaggagagatttcagaacaggatatttcctattttgagtatcctgctcatgccagtcatggataaatttgcatctggcttaagaaattactggatcagcattgttttgggtagtttcacttcctgctgggtggggtagcaggctctataaagagatcctctgctgcacgactcttaaacccctggtacctgagcactgatctgccttggagaacctggtgagtcggcttccttgagttcctctgttctttgtgccctgaaatgttgagtttaatctgaatatggcaagtttggtggatccaatcctatgaaaattgacttgatgctacttagtggatgaaaatttaagattagagcacaattatatgctattttagctttcttttgttatacaggtaggtatccatatggacagagaagttaaggggtaacctttgatatgaagaagaaaaaagaacaaagtatttttctttattctcttgctttctagtgtcctttacaaaggtttgtgtcttagcaggtgtgaaagactacaattctccctgagcagccctttgctctatgcccaagtcagcccacttggactttataacagataatgatgataggaatagcatattagattgcccagggtgtctgaacttgtgactgcctttcttgaattggttattttcagggaaataagatgcttgattctttataacagagataatttatttggaaaaattgtatgagaaaacacaggatttcctagggacaatgaagcaatttgttaaagtggaagggagaaaccagaaagtcttgaaaaggtaattaagaatttaaataatttcttggagattggagaaataatatgccatggtattacacaagctttggcttctctctctggaggattcccttcccacgaacactgttgtatcatttctttcagatcctgagactccagcaggatgtcttatcaacagcagcagtgcaagcagccctgccagccacctcctgtgtgccccacgccaaagtgcccagagccatgtccacccccgaagtgccctgagccctgcccaccaccaaagtgtccacagccctgcccacctcagcagtgccagcagaaatatcctcctgtgacaccttccccaccctgccagtcaaagtatccacccaagagcaagtaacagcttcagaattcatcaggaccaagaaaggataaggatatttggctcacctcgttccacagctccaccttcatcttctcatcaaagcctaccatggatacacagggagcttctttctccttagccagtaatctgcccatgatgatc

SEQ ID NO: 665 - DNA, 2727 bp, Homo sapiens
ggggacactggatcacctagtgtttcacaagcaggtaccttctgctgtaggagagagagaactaaagttctgaaagacctgttgcttttcaccaggaagttttactgggcatctcctgagcctaggcaatagctgtagggtgacttctggagccatccccgtttccccgccccccaaaagaagcggagatttaacggggacgtgcggccagagctggggaaatgggcccgcgagccaggccggcgcttctcctcctgatgcttttgcagaccgcggtcctgcaggggcgcttgctgcgttcacactctctgcactacctcttcatgggtgcctcagagcaggaccttggtctttccttgtttgaagctttgggctacgtggatgaccagctgttcgtgttctatgatcatgagagtcgccgtgtggagccccgaactccatgggtttccagtagaatttcaagccagatgtggctgcagctgagtcagagtctgaaagggtgggatcacatgttcactgttgacttctggactattatggaaaatcacaaccacagcaaggagtcccacaccctgcaggtcatcctgggctgtgaaatgcaagaagacaacagtaccgagggctactggaagtacgggtatgatgggcaggaccaccttgaattctgccctgacacactggattggagagcagcagaacccagggcctggcccaccaagctggagtgggaaaggcacaagattcgggccaggcagaacagggcctacctggagagggactgccctgcacagctgcagcagttgctggagctggggagaggtgttttggaccaacaagtgcctcctttggtgaaggtgacacatcatgtgacctcttcagtgaccactctacggtgtcgggccttgaactactacccccagaacatcaccatgaagtggctgaaggataagcagccaatggatgccaaggagttcgaacctaaagacgtattgcccaatggggatgggacctaccagggctggataaccttggctgtaccccctggggaagagcagagatatacgtgccaggtggagcacccaggcctggatcagcccctcattgtgatctgggagccctcaccgtctggcaccctagtcattggagtcatcagtggaattgctgtttttgtcgtcatcttgttcattggaattttgttcataatattaaggaagaggcagggttcaagaggagccatggggcactacgtcttagctgaacgtgagtgacacgcagcctgcagactcactgtgggaaggagacaaaactagagactcaaagagggagtgcatttatgagctcttcatgtttcaggagagagttgaacctaaacatagaaattgcctgacgaactccttgattttagccttctctgttcatttcctcaaaaagatttccccatttaggtttctgagttcctgcatgccggtgatccctagctgtgacctctcccctggaactgtctctcatgaacctcaagctgcatctagaggcttccttcatttcctccgtcacctcagagacatacacctatgtcatttcatttcctatttttggaagaggactccttaaatttgggggacttacatgattcattttaacatctgagaaaagctttgaaccctgggacgtggctagtcataaccttaccagatttttacacatgtatctatgcattttctggacccgttcaacttttcctttgaatcctctctctgtgttacccagtaactcatctgtcaccaagccttggggattcttccatctgattgtgatgtgagttgcacagctatgaaggctgtgcactgcacgaatggaagaggcacctgtcccagaaaaagcatcatggctatctgtgggtagtatgatgggtgtttttagcaggtaggaggcaaatatcttgaaaggggttgtgaagaggtgttttttctaattggcatgaaggtgtcatacagatttgcaaagtttaatggtgccttcatttgggatgctactctagtattccagacctgaagaatcacaataattttctacctggtctctccttgttctgataatgaaaattatgataaggatgataaaagcacttacttcgtgtccgactcttctgagcacctacttacatgcattactgcatgcacttcttacaataattctatgagataggtactattatccccatttcttttttaaatgaagaaagtgaagtaggccgggcacggtggctcgcgcctgtggtcccagggtgctgagattgcaggtgtgagccaccctgcccagccgtcaaaagagtcttaatatatatatccagatggcatgtgtttactttatgttactacatgcacttggctgcataaatgtggtacaaccattctgtcttgaagggcaggtgcttcaggataccatatacagctcagaagtttcttctttaggcattaaattttagcaaagatatctcatctcttcttttaaaccattttctttttttgtggttagaaaagttatgtagaaaaaagtaaatgtgatttacgctcattgtagaaaagctataaaatgaatacaattaaagctgttatttaattagccagtgaaaaactattaacaacttgtctattacctgttagtattattgttgcattaaaaatgcatatactttaataaatgtacattgtattgtaaaaaaaaaaa

SEQ ID NO: 666 - DNA, 1860 bp, Homo sapiens
gcggatcctcacacgactgtgatccgattctttccagcggcttctgcaaccaagcgggtcttacccccggtcctccgcgtctccagtcctcgcacctggaaccccaacgtccccgagagtccccgaatccccgctcccaggctacctaagaggatgagcggtgctccgacggccggggcagccctgatgctctgcgccgccaccgccgtgctactgagcgctcagggcggacccgtgcagtccaagtcgccgcgctttgcgtcctgggacgagatgaatgtcctggcgcacggactcctgcagctcggccaggggtgcgcgaacaccggagcgcacccgcagtcagctgagcgcgctggagcgcgcctgagcgcgtgcgggtccgcctgtcagggaaccgaggggtccaccgacctcccgttagcccctgagagccgggtggaccctgaggtccttcacagcctgcagacacaactcaaggctcagaacagcaggatccagcaactcttccacaaggtggcccagcagcagcggcacctggagaagcagcacctgcgaattcagcatctgcaaagccagtttggcctcctggaccacaagcacctagaccatgaggtggccaagcctgcccgaagaaagaggctgcccgagatggcccagccagttgacccggctcacaatgtcagccgcctgcaccggctgcccagggattgccaggagctgttccaggttggggagaggcagagtggactatttgaaatccagcctcaggggtctccgccatttttggtgaactgcaagatgacctcagatggaggctggacagtaattcagaggcgccacgatggctcagtggacttcaaccggccctgggaagcctacaaggcggggtttggggatccccacggcgagttctggctgggtctggagaaggtgcatagcatcacgggggaccgcaacagccgcctggccgtgcagctgcgggactgggatggcaacgccgagttgctgcagttctccgtgcacctgggtggcgaggacacggcctatagcctgcagctcactgcacccgtggccggccagctgggcgccaccaccgtcccacccagcggcctctccgtacccttctccacttgggaccaggatcacgacctccgcagggacaagaactgcgccaagagcctctctggaggctggtggtttggcacctgcagccattccaacctcaacggccagtacttccgctccatcccacagcagcggcagaagcttaagaagggaatcttctggaagacctggcggggccgctactacccgctgcaggccaccaccatgttgatccagcccatggcagcagaggcagcctcctagcgtcctggctgggcctggtcccaggcccacgaaagacggtgactcttggctctgcccgaggatgtggccaagaccacgactggagaagccccctttctgagtgcaggggggctgcatgcgttgcctcctgagatcgaggctgcaggatatgctcagactctagaggcgtggaccaaggggcatggagcttcactccttgctggccagggagttggggactcagagggaccacttggggccagccagactggcctcaatggcggactcagtcacattgactgacggggaccagggcttgtgtgggtcgagagcgccctcatggtgctggtgctgttgtgtgtaggtcccctggggacacaagcaggcgccaatggtatctgggcggagctcacagagttcttggaataaaagcaacctcagaacaaaaaaaaaaaaaaaaaagcggagctcacagagttcttggaataaaagcaacctcagaacaaaaaa

SEQ ID NO: 667 - DNA, 2192 bp, Homo sapiens
gaattctccagcctcagcctccagagtagtttcgggattacagacatgtgcccaccatgcccagctaattttttgctttgtttgtttgtttgtttgtatttttagtagagatcggggttttgcccatttggccaggcctggtctcgaactcctgacctcgaatgataatgatccgcccgcccttggcctcccaaagtgctaggattacaggtgtgagccactgcgccaggcctgggcactttctttagtagtttgaggagcaacatttttgacagtgtccttctgctcaagattcagatcccagataaaattaaaccatctagagagatggcttgattggccaaacctggatctcatgaccacttcttgaagtgggtaagtctcataaatgctcagtccttccactatgcaactgagtggggtgggtgggaagcccctcaaaggaaaatccggttgttcttactagaaagaaaaggaaaatggatgtgaggcagtcaaaatcagcagaggccaccacaccaccaaaatgtggtgattaaatatggagagacagagactaacagaggtatgtgaatattgaagtatgtctggacaatagcccaatgatgagaccaataaaatggttaccaaaatctggttttgagtagtagtgttaaatcagaccatttgtaaccattttttgttgcaaagtttctagcactgcccaaaccctgagtggtatatgaataactcgtccattatgtatctcttcccagtcagcataatttatcccccacctatattcttttctgaccactcctacttccttctctttaccaaaatctaaactctaaggctgtttcttcagcaacttctttgtttagattggaagataaattaaacagcatgcgatgttttactgactttcagtatttaacagaggtgatttaatttttttttaaatccaaagtcaaacttctttataagatgaaggagaaaaatgtcttataaaatgcatatgtgaagatgccttctgagtgctttctcatgcagacttgttctagtctttaatgaatcttccttgtagacactgtggagatgaaagatggttctccacttctactcaaagtacaaatcaggccggcattttgaaaaagagacaggtttattcatagctgcagcgttagctggctttgttccctgtacaatttcacttttggttattaaaatattcactgtaggaaataaatttgtaacccatttctcatattacctacacacagaaaaacaaaatttgatatcctggggtttatttgctgagggcgcttcccataaaagcgagagagtgtgcgttgggaaatgtgtctggttaactcttttatggataaactttagtcacaatcctcccccgcccccctctcacccccagcaccctcccaacctcccgacttcccgcctctcaagggctggtgacctaatagcatttttcttcgtgcatattttggcgtcgccccatggcctggctgccttcgcctgtctgagttttttgaaattcctgcatgttcgccccagattaagccagtgtgtctcaggatgtgtgttccgttttgttctttccccttaacgctccctgtgcaacgtgtctggggggaggagggcagggacgggagagagggaggggcagaggcgaggagctgtccgccttgcacgtttccaatcgcattacgtgaacaaatagctgaggggccgccccgccagaacggcttgtgtaactttgcaaacgtgccagaaagtttaaaatctctcctccttccttcactccagacactgcccgctctccgggactgccgccgctccccgttgccttccaggactgagaaaggggaaagggaagggtgccacgtccgagcagccgccttgactggggaagggtctgaatcccacccttggcattgcttggtggagactgagatacccgtgctccgctcgcctccttggttgaagatttctccttccctcacgtgatttgagccccgtttttattttctgtgagccacgtcctcctcgagcggggtcaatctggcaaaaggagtgatgcgcttcgcctggaccgtgctcctgctcgggcctttgcagctctgcgcgctagtgcactgcgcccctcccgccgccggccaacagcagcccccgcgcgagccgccggcggctccggg

SEQ ID NO: 668 - DNA, 1086 bp, Homo sapiens
ctcggctcactgcaacctccgcctcccaggttcaagtgattctcctgcctcagtctcccaagtagctgggattacaggcatgtgccaccatgcccagctaattttttgtatttttacattttgtgtaaaactacaaattttgtgttttcaaacccgtctctacaaaacaacccatgttgcccaggctggtctcaaactcccaggcccaagtgattcaccagcctggccctcccaaagtgctgggattgcaggcttgagccactgcgcctgccctgggctttgttttcttatcagagaatgaactggtaggaattgggaaaggcatgaaagactcggggtccttccccacttgtcagaccctcttttctctccggaacacccagggatccttctcaaggagagctggatcccatccctggtctccaggggtatttacccaacgtcccaatccccacagtataggactcttcatcagatcctcctcttaggcaagctaggtccttccaggaccctagcgctgaaggtccatgggacggacaccctggattcccatggacacactacaccggctgggaaaacccggcccccttaggaaaagcacttctgctctaccggcattaagaggcattccgtcttggaattccggcattaagaggcattccgtcttcatagcccgtgagacgccagtgtcacctttagcccaaccagtgccctgagggtggcattttcctaccttcctgtaacgacccccgggattgcccagggctacagcctctctcccgtgagcctccagaccgcccctggccccgccccccaccccgataggcccggccgggtctgggggcggggcgtttgcggcctttccagggccggggaaccccaggaggaagctgctgagccatgggctacgcgcgggcttcgggggtctgcgctcgcggctgcctggactcagcaggcccctggaccatgtcccgcgccctgcggccaccgctcccgcctctctgctttttccttttgttgctggcggctgccggtgctcgggccgggggatacgaggtgagtggggcctccgagctgaaacgtaca

SEQ ID NO: 669 - DNA, 4597 bp, Homo sapiens
cgacattttaactgaactgcgggataaagtgaaatctttccgtgcagctctacgagaggaggaaattgttcctcgtctgataagacaacagtggagaaaggacgcatgctgtttcttagggacacggctgacttccagatatgaccatgtatttgtggcttaaactcttggcatttggctttgcctttctggacacagaagtatttgtgacagggcaaagcccaacaccttcccccactgatgcctaccttaatgcctctgaaacaaccactctgagcccttctggaagcgctgtcatttcaaccacaacaatagctactactccatctaagccaacatgtgatgaaaaatatgcaaacatcactgtggattacttatataacaaggaaactaaattatttacagcaaagctaaatgttaatgagaatgtggaatgtggaaacaatacttgcacaaacaatgaggtgcataaccttacagaatgtaaaaatgcgtctgtttccatatctcataattcatgtactgctcctgataagacattaatattagatgtgccaccaggggttgaaaagtttcagttacatgattgtacacaagttgaaaaagcagatactactatttgtttaaaatggaaaaatattgaaacctttacttgtgatacacagaatattacctacagatttcagtgtggtaatatgatatttgataataaagaaattaaattagaaaaccttgaacccgaacatgagtataagtgtgactcagaaatactctataataaccacaagtttactaacgcaagtaaaattattaaaacagattttgggagtccaggagagcctcagattattttttgtagaagtgaagctgcacatcaaggagtaattacctggaatccccctcaaagatcatttcataattttaccctctgttatataaaagagacagaaaaagattgcctcaatctggataaaaacctgatcaaatatgatttgcaaaatttaaaaccttatacgaaatatgttttatcattacatgcctacatcattgcaaaagtgcaacgtaatggaagtgctgcaatgtgtcatttcacaactaaaagtgctcctccaagccaggtctggaacatgactgtctccatgacatcagataatagtatgcatgtcaagtgtaggcctcccagggaccgtaatggcccccatgaacgttaccatttggaagttgaagctggaaatactctggttagaaatgagtcgcataagaattgcgatttccgtgtaaaagatcttcaatattcaacagactacacttttaaggcctattttcacaatggagactatcctggagaaccctttattttacatcattcaacatcttataattctaaggcactgatagcatttctggcatttctgattattgtgacatcaatagccctgcttgttgttctctacaaaatctatgatctacataagaaaagatcctgcaatttagatgaacagcaggagcttgttgaaagggatgatgaaaaacaactgatgaatgtggagccaatccatgcagatattttgttggaaacttataagaggaagattgctgatgaaggaagactttttctggctgaatttcagagcatcccgcgggtgttcagcaagtttcctataaaggaagctcgaaagccctttaaccagaataaaaaccgttatgttgacattcttccttatgattataaccgtgttgaactctctgagataaacggagatgcagggtcaaactacataaatgccagctatattgatggtttcaaagaacccaggaaatacattgctgcacaaggtcccagggatgaaactgttgatgatttctggaggatgatttgggaacagaaagccacagttattgtcatggtcactcgatgtgaagaaggaaacaggaacaagtgtgcagaatactggccgtcaatggaagagggcactcgggcttttggagatgttgttgtaaagatcaaccagcacaaaagatgtccagattacatcattcagaaattgaacattgtaaataaaaaagaaaaagcaactggaagagaggtgactcacattcagttcaccagctggccagaccacggggtgcctgaggatcctcacttgctcctcaaactgagaaggagagtgaatgccttcagcaatttcttcagtggtcccattgtggtgcactgcagtgctggtgttgggcgcacaggaacctatatcggaattgatgccatgctagaaggcctggaagccgagaacaaagtggatgtttatggttatgttgtcaagctaaggcgacagagatgcctgatggttcaagtagaggcccagtacatcttgatccatcaggctttggtggaatacaatcagtttggagaaacagaagtgaatttgtctgaattacatccatatctacataacatgaagaaaagggatccacccagtgagccgtctccactagaggctgaattccagagacttccttcatataggagctggaggacacagcacattggaaatcaagaagaaaataaaagtaaaaacaggaattctaatgtcatcccatatgactataacagagtgccacttaaacatgagctggaaatgagtaaagagagtgagcatgattcagatgaatcctctgatgatgacagtgattcagaggaaccaagcaaatacatcaatgcatcttttataatgagctactggaaacctgaagtgatgattgctgctcagggaccactgaaggagaccattggtgacttttggcagatgatcttccaaagaaaagtcaaagttattgttatgctgacagaactgaaacatggagaccaggaaatctgtgctcagtactggggagaaggaaagcaaacatatggagatattgaagttgacctgaaagacacagacaaatcttcaacttatacccttcgtgtctttgaactgagacattccaagaggaaagactctcgaactgtgtaccagtaccaatatacaaactggagtgtggagcagcttcctgcagaacccaaggaattaatctctatgattcaggtcgtcaaacaaaaacttccccagaagaattcctctgaagggaacaagcatcacaagagtacacctctactcattcactgcagggatggatctcagcaaacgggaatattttgtgctttgttaaatctcttagaaagtgcggaaacagaagaggtagtggatatttttcaagtggtaaaagctctacgcaaagctaggccaggcatggtttccacattcgagcaatatcaattcctatatgacgtcattgccagcacctaccctgctcagaatggacaagtaaagaaaaacaaccatcaagaagataaaattgaatttgataatgaagtggacaaagtaaagcaggatgctaattgtgttaatccacttggtgccccagaaaagctccctgaagcaaaggaacaggctgaaggttctgaacccacgagtggcactgaggggccagaacattctgtcaatggtcctgcaagtccagccttaaatcaaggttcataggaaaagacataaatgaggaaactccaaacctcctgttagctgttatttctatttttgtagaagtaggaagtgaaaataggtatacagtggattaattaaatgcagcgaaccaatatttgtagaagggttatattttactactgtggaaaaatatttaagatagttttgccagaacagtttgtacagacgtatgcttattttaaaattttatctcttattcagtaaaaaacaacttctttgtaatcgttatgtgtgtatatgtatgtgtgtatgggtgtgtgtttgtgtgagagacagagaaagagagagaattctttcaagtgaatctaaaagcttttgcttttcctttgtttttatgaagaaaaaatacattttatattagaagtgttaacttagcttgaaggatctgtttttaaaaatcataaactgtgtgcagactcaataaaatcatgtacatttctgaaatgacctcaagatgtcctccttgttctactcatatatatctatcttatatacttactattttacttctagagatagtacataaaggtggtatgtgtgtgtatgctactacaaaaaagttgttaactaaattaacattgggaaatcttatattccatatattagcatttagtccaatgtctttttaagcttatttaattaaaaaatttccagtgagcttatcatgctgtctttacatggggttttcaattttgcatgctcgattattccctgtacaatatttaaaatttattgcttgatacttttgacaacaaattaggttttgtacaattgaacttaaataaatgtcattaaaataaataaatgcaatatgtattaatattcattgtataaaaatagaagaatacaaacatatttgttaaatatttacatatgaaatttaatatagctatttttatggaatttttcattgatatgaaaaatatgatattgcatatgcatagttcccatgttaaatcccattcataactttcattaaagcatttactttgaatttc

SEQ ID NO: 670 - DNA, 2531 bp, Homo sapiens
tctaagtagtatcttggaaattcagagagatactcatcctacctgaatataaactgagataaatccagtaaagaaagtgtagtaaattctacataagagtctatcattgatttcttttggtggtaaaaatcttagttcatgtgaagaaatttcatgtgaatgttttagctatcaaacagcactgtcacctactcatgcacaaaactgcctcccaaagacttttcccaggtccctcgtatcaaaacattaagagtataatggaagatagcacgatcttgtcagattggacaaacagcaacaaacaaaaaatgaagtatgacttttcctgtgaactctacagaatgtctacatattcaactttccccgccggggtgcctgtctcagaaaggagtcttgctcgtgctggtttttattatactggtgtgaatgacaaggtcaaatgcttctgttgtggcctgatgctggataactggaaactaggagacagtcctattcaaaagcataaacagctatatcctagctgtagctttattcagaatctggtttcagctagtctgggatccacctctaagaatacgtctccaatgagaaacagttttgcacattcattatctcccaccttggaacatagtagcttgttcagtggttcttactccagcctttctccaaaccctcttaattctagagcagttgaagacatctcttcatcgaggactaacccctacagttatgcaatgagtactgaagaagccagatttcttacctaccatatgtggccattaacttttttgtcaccatcagaattggcaagagctggtttttattatataggacctggagatagggtagcctgctttgcctgtggtgggaagctcagtaactgggaaccaaaggatgatgctatgtcagaacaccggaggcattttcccaactgtccatttttggaaaattctctagaaactctgaggtttagcatttcaaatctgagcatgcagacacatgcagctcgaatgagaacatttatgtactggccatctagtgttccagttcagcctgagcagcttgcaagtgctggtttttattatgtgggtcgcaatgatgatgtcaaatgcttttgttgtgatggtggcttgaggtgttgggaatctggagatgatccatgggtagaacatgccaagtggtttccaaggtgtgagttcttgatacgaatgaaaggccaagagtttgttgatgagattcaaggtagatatcctcatcttcttgaacagctgttgtcaacttcagataccactggagaagaaaatgctgacccaccaattattcattttggacctggagaaagttcttcagaagatgctgtcatgatgaatacacctgtggttaaatctgccttggaaatgggctttaatagagacctggtgaaacaaacagttcaaagtaaaatcctgacaactggagagaactataaaacagttaatgatattgtgtcagcacttctaaatgctgaagatgaaaaaagagaggaggagaaggaaaaacaagctgaagaaatggcatcagatgatttgtcattaattcggaagaacagaatggctctctttcaacaattgacatgtgtgcttcctatcctggataatcttttaaaggccaatgtaattaataaacaggaacatgatattattaaacaaaaaacacagatacctttacaagcgagagaactgattgataccattttggttaaaggaaatgctgcggccaacatcttcaaaaactgtctaaaagaaattgactctacattgtataagaacttatttgtggataagaatatgaagtatattccaacagaagatgtttcaggtctgtcactggaagaacaattgaggaggttgcaagaagaacgaacttgtaaagtgtgtatggacaaagaagtttctgttgtatttattccttgtggtcatctggtagtatgccaggaatgtgccccttctctaagaaaatgccctatttgcaggggtataatcaagggtactgttcgtacatttctctcttaaagaaaaatagtctatattttaacctgcataaaaaggtctttaaaatattgttgaacacttgaagccatctaaagtaaaaagggaattatgagtttttcaattagtaacattcatgttctagtctgctttggtactaataatcttgtttctgaaaagatggtatcatatatttaatcttaatctgtttatttacaagggaagatttatgtttggtgaactatattagtatgtatgtgtacctaagggagtagtgtcactgcttgttatgcatcatttcaggagttactggatttgttgttctttcagaaagctttgaatactaaattatagtgtagaaaagaactggaaaccaggaactctggagttcatcagagttatggtgccgaattgtctttggtgcttttcacttgtgttttaaaataaggatttttctcttatttctccccctagtttgtgagaaacatctcaataaagtgcttt

SEQ ID NO: 671 - DNA, 958 bp, Homo sapiens
ctccccgagatggcgggtctgacggcggcggccccgcggcccggagtcctcctgctcctgctgtccatcctccacccctctcggcctggaggggtccctggggccattcctggtggagttcctggaggagtcttttatccaggggctggtctcggagcccttggaggaggagcgctggggcctggaggcaaacctcttaagccagttcccggagggcttgcgggtgctggccttggggcagggctcggcgccttccccgcagttacctttccgggggctctggtgcctggtggagtggctgacgctgctgcagcctataaagctgctaaggctggcgctgggcttggtggtgtcccaggagttggtggcttaggagtgtctgcaggtgcggtggttcctcagcctggagccggagtgaagcctgggaaagtgccgggtgtggggctgccaggtgtatacccaggtggcgtgctcccaggagctcggttccccggtgtgggggtgctccctggagttcccactggagcaggagttaagcccaaggctccaggtgtaggtggagcttttgctggaatcccaggagttggaccctttgggggaccgcaacctggagtcccactggggtatcccatcaaggcccccaagctgcctggtggctatggactgccctacaccacagggaaactgccctatggctatgggcccggaggagtggctggtgcagcgggcaaggctggttacccaacagggacaggggttggcccccaggcagcagcagcagcggcagctaaagcagcagcaaagttcggtgctggagcagccggagtcctccctggtgttggaggggctggtgttcctggcgtgcctggggcaattcctggaattggaggcatcgcaggcgttgggactccagctgcagctgcagctgcagcagcagccgctaaggcagccaagtatg

SEQ ID NO: 672 - DNA, 1125 bp, Homo sapiens; identical to SEQ ID NO: 42

SEQ ID NO: 673 - DNA, 8177 bp, Homo sapiens
cactgcgaagcccagctgcgcgcgccttgggattgactgtccacgctcgcccggctcgtccgacgcgccctccgccagccgacagacacagccgcacgcactgccgtgttctccctgcggctcggtgagcctggccccagccctgcgccctttgcgccccccacgcttgttctgcgtgcgctgcccgctcttccatttaccttctctcccacccaagtttgtactcttttctttctctcggttttattttttgtttttgtttgtttgtttgagacaggctttcgctctgtctcccaggctggagtgcagtggcgcgatctcggctcactgcagcctccacctcccaggttcaagcgatccgcctgccgagtagctgggattacaggcgcccgccaccacgcctggctaatttttgtgttttgtagagatggggtttcgccatgttggccaggctggcctcgaactgctgagctcaagcaatccgcccgcctcggcctcacaaagtcgtagaattttaggcatgagcctccgggtccggcctgtgctaatcctttctgtccttggttctttatttctcttctctctttttcttagtcccttttgttctttccctctcccgttcaggggctgtcgtttgagcctccaccttttcactccctcctttccaccacgatgccgagccctgccttggatggggaccatcagcgatgaccacaatgactctcccttaccaggcagctccaggcagtgttcctgcaccgcctttcccagggcttgggggctttttctagtgggctttgagctgctcaatctggcctctgcagggccggctcccagcccttccaacctcctcacagcccgacctgggacctagccaattcccggagagtctctgtcccatcgtgaccccctcacaactctcccactcaccaaagtctgatgactgtgctagggggtgcttatatagagtactgagtgttacaaaagcagaagtctggatgagaaccaatttgtgatattaagcaggtggggtgggggtggggagtgtacctaggttcattttccgccctgcttttcccctttccagtgtgtgcacttaaccagtccctgggccctgttccccatccccctccaaggcatggattgggtgggcttgtgtgtcttggggcaggtggccctttctaaactctctgcctttgctcacccacaggacacatagtatgaccattaggtgtttcgtctcccacccattttctatggaaaaccaaggggatcgggccatgatagccactggcagctttgaagaacgggacacctttagagaagcttgatcttggaggcctcaccgtgagaccttacaaagccgggtaagagtccagtccaaggaagaggtctcttgctgcctcctaaccctgtggtctaggggcaggagtcagcagggcattaacaaaaataattaccatccccacccccgacagtgaagtggctctttccagttcacagagcactctcacacctccccgctctcattctggcccttcagctgactcggacaagccaaggatcttggtccccattttataaaggagaaaactgaggcccacgtgtaacagtgattggccccaagtcatcccgggagccagcagaagagctaggacaggaacctattgttctaacttcatattgatgctagcttttgactatccctgaaaccgagattggtaatcagcccggctctgaaactggttatttgctggggactgtaaaataggattaactatttctagtcctgcattttaattgctgttagtagggccatcttacccaccctctgaaggacctgacttggcaagcccaaggcaacattcagaatatggcagctgaacctctgtgcacttgtctttgggcagcagctgggtcttattcttctctggccttcacaacatcctgcaacccagctcaaggtcaggaatgtgacagactcatgtcatcatatctctgatgcccagagaagggataccatttgcctgagccttctcagtactgtttaatcagcctgtgagaactttccttgtgaaaggccctgtctgtgcctggggctgataaaacagcaagaacgaactgaggagctgggcagcagtgcaaagcaaatactaccagctttggtgcctgtaagtgtggctcttactcatctcacatggaaataagggcagccaccttgcagggctgctctgaggattgagctaatacagtgccctgggcgttggggtggggaaagttgtggagcacctcctgggggaagggggtgtcagagcagggaatctggggagtccgagggcaccttcatcaacccaatctgtcatttgagcaccagtcttcactgagcctcgtgggcaagctggagggaaacaggaataaggtcaggccctgttctataggtcccagtgtagttgctatggtgagtatcttcatttccctgcttgccccagccacctggagtgagaagcccaagaggaagctgggtgagctgtttgtttccatgggtctctgtgttcacagctgactcccttcaccagccagccctttcacctgagccccagcaacaaaggcagtcaggcggggctcaaagcagctgctccaatgaagtcaaagaaataagctcaggggaagaagcaggtcaccctcccccactagggtgctgggctcacttcctcctggggcagtggaggagggtgtggttccaactcagaacaaaatggggcttttggtttactttatcactcttcacagctctgacctggacccctcatgccctgcctgtcttgtggtgtaagtgcggatccccctaagttggaggaaaggaaactggcccaaacaaaaaggagagcagttttctctgcatcacatggtaggccaggaggagtctaatgccccagagtttactctcagcccccaaaatcacctagctaaatgttaccttatctaagaagtccttaggttttttggggtttgttttttttttttttgagacaaggtctcactctctcacccagactggagcacagtggcacaatcacagctcactgcagcctcaacctcctgggctcaagcaatcgtcccaagtagctgggactataggcctgcaccaccatgtccagctaatttatttttatttatattttttagacagggtctcattatgttgccctggctggtcttgaactcctgggttcaagcagtcctcccacctctgcctcccaaagtgctaggtttttttttgtttgtttgtttgtttgttttttgaaacagagtcttgctctgtcgcctaggctggagtgcagtggcacgatctcagctactgcaacctccacctcctgggttcaagtgattctcctgcctcagcctcctaagtagttgggaatacaggcgtgtgccaacacacccagctcatttttgtatttttagcggagatggggttttgccatgttggccaagctggtctcaaactcctgacctcaggtgattcgcccgcctcagcctcccaaagtgctgggtttacaggcgtgagccaccacacccagcccaagaagtcttttctgatcacccactcttccttctctcccaatggcattagttgttccctcctttgcattttgagagtatgtcctgtaagccccaaatgcagcttgaatcatctgcccatccaccccctgtgcccaacagtaagcctcctctagagtagatactatctcctgcatctcagtgaaccactgcccagcaaagcagtcttgctaaaacaatgactctagagatcctaagctgtgtgagagctggaggagagaattagactgatggtctgggaagggattgaattagtcatcttgtaccttttcttcttgacttaagttccagacctgtagcaaccattcctgcttagacatccagaacataagcctatgggtctgtgcctgttgggtcttagtctgggtgaaacttttctctacttctgtcagctctccagatgaaccacagaagcaggaatgtgggcatcatcagtgaaatctctgcatacagcagacaaagggctggtccagtggctgtttatgaggcagcgctaggagagctctgatccagactctccctgcagtgaaagggagggagcccttcatgaagtattgactgcttgagcaggaattgcttcaccagcacctaactgagtgcctctcgagctcacatcggttttccctcatgaggccacttggagtcttgctgagggacttggttctattagggaaggtgagtttggggatggtgagcagggagggcctggggacattgtggctaatggggcttttctcctcttggcttagattccggcagagttcctctatctcgtcttgttgctgattaaaggtgcccctgtctccagtttttctccatctcctgggacgtagcaggaaatcagcatcatggttgggttcaaggccacagatgtgccccctactgccactgtgaagtttcttggggctggcacagctgcctgcatcgcagatctcatcacctttcctctggatactgctaaagtccggttacaggtgaggggatgaagcctgggagtcttgatggtgtctactctgttccctccccaaagacacagacccctcaagggccagtgtttggagcatcgagatgactggaggtgggaagggcaacatgcttatccctgtagctaccctgtcttggccttgcagatccaaggagaaagtcaggggccagtgcgcgctacagccagcgcccagtaccgcggtgtgatgggcaccattctgaccatggtgcgtactgagggcccccgaagcctctacaatgggctggttgccggcctgcagcgccaaatgagctttgcctctgtccgcatcggcctgtatgattctgtcaaacagttctacaccaagggctctgagcgtgagtatggagcaagggtgtaggccccttggcccttttttctcagtgatgattgatcttagttcattcagccatatagttttttaggccccacgatccctaggaagatcaggggaacagagaactggaaggggccctggtcctccacatagttcctaagcacctgggctataccaggctctgagcagggcgtcatcccatcacagtcttcaacaccaccttgggagtaggtagtatcatcccagtgttatagaagaagagactgaggtgggaaggcagtgggtagagtggggacttggccaggggcacacagtagagagccagaaaacacacagtagagagccaggacactcgtctctaaggccagcgttcttccctttcacctccttagtatgccatgccaaccctccattttacacatgacgaaacagagccccaaacaaaaggttgtctttcccagatcacatggcaggaagaagtaaagctgacctgagatcccaagtcttaggaatcccagtcctcagaaagccacttctctctgagccttggttttcacatttgtcagatggaaatgattgtgatttctcagggctgttgagcaggtaaatgaaaatgttttatgaaagaaagcaccaagtttcattttggtcttagcccttgctatgtccctagcaagaagtagatattcatagggatattttgtttgatgtgaggagttcttacagcaagagcttgtagaaggccaaaagcttctggattctaatcccaaaagcaggagatgacagtgacagggtggttttggtgaggagagatgaggtagaaaatgagtgcaagcccgctggccactgaccccatggctcgcccacagatgccagcattgggagccgcctcctagcaggcagcaccacaggtgccctggctgtggctgtggcccagcccacggatgtggtaaaggtccgattccaagctcaggcccgggctggaggtggtcggagataccaaagcaccgtcaatgcctacaagaccattgcccgagaggaagggttccggggcctctggaaaggtgtgtaccagttgttttcccttccccttttcctcctccccgatactctggtctcacccaggatcttcctcctcctacagggacctctcccaatgttgctcgtaatgccattgtcaactgtgctgagctggtgacctatgacctcatcaaggatgccctcctgaaagccaacctcatgacaggtgagtcatgaggtagacggtgctgggtctcacccttcccccatgccaggagcaggtgcgggggtctagctgacaccagaagaccacatcttttcatcctatttgccctttgcagggagagtaagatatctcttacttgccatattgaagccaattgggatgaagctcccactttgcacattgaggaactgaggctagattggcaaaatgactctttcaggtcctcagaagatgtctcagctggagtccctgtctgtttttgtttttttgtttgtttgttttttgttttttttgagatagagtctcactctgttacccgtgtaatctcagctcactgcaaccttctcctcctgggttcaagcgattcttgtgcctcagcctcccgagtagctgggatgacaggtgtgcaccagcacactggctaatttttgtatttttagtagagatggagtttcaccatgttagccaggctggtctcgaactcctggcctcaagtgatctgcccaccttggcctcccaatgtgctgggattacaggtgtgagcctctgcgccccatcctcttgtttgttttttgagacagggtcttgctcggttgcccaggctggagtgcagtggggtgattaatggctcattgcagcctcgacctccctgactcaagcaatcctcccacctcagcctcctgagtagctggggctgactacaggcatgcacactgtgcctggctaatttttgtattttgtagagacagggtttttgccatgttacccagtctggtcttgaactcctgggctcaagtgatccacccacctcggcctccaaaagaagtcctggattacaggcatgagacattgtgcccagcctctctgtctctttaaaatcatgaaaactcgtagctacttaagtaattctcctgccttctggaatgatgggtgaagatcttgactgccttgcctgctcctccttggcagatgacctcccttgccacttcacttctgcctttggggcaggcttctgcaccactgtcatcgcctcccctgtagacgtggtcaagacgagatacatgaactctgccctgggccagtacagtagcgctggccactgtgcccttaccatgctccagaaggaggggccccgagccttctacaaagggtgagcctctggtcctccccacccagttcaggcctcttggctatgcatgtctattatgggtgggagagaaccacctggaagtgagtagcagccaagtgtgactatttctgatcctggtcgtggcatttcaccagcattcacctatccccttaattccttcctcccagaattgctaccatcactgtttattaggtgttaaatggagactcaaagggaattcatgcttatagccaagcagctgtgagctcagttcattgagtcctcccagcctcctttgggacagagcaactgggttggattgaataccaggcccagtgagggaagtgggaggtggaggtgcccccatgacctgtgatttttctcctctaggttcatgccctcctttctccgcttgggttcctggaacgtggtgatgttcgtcacctatgagcagctgaaacgagccctcatggctgcctgcacttcccgagaggctcccttctgagcctctcctgctgctgacctgatcacctctggctttgtctctagccgggccatgctttccttttcttccttctttctcttccctccttcccttctctccttccctctttccccacctcttccttccgctcctttacctaccaccttccctctttctacattctcatctactcattgtctcagtgctggtggagttgacatttgacagtgtgggaggcctcgtaccagccaggatcccaagcgtcccgtcccttggaaagttcagccagaatcttcgtcctgcccccgacagcccagcctagcccacttgtcatccataaagcaagctcaaccttgg

SEQ ID NO: 674 - DNA, 1451 bp, Homo sapiens; identical to SEQ ID NO: 44

SEQ ID NO: 675 - DNA, 717 bp, Homo sapiens; identical to SEQ ID NO: 46

SEQ ID NO: 676 - DNA, 3237 bp, Homo sapiens; identical to SEQ ID NO: 47

SEQ ID NO: 677 - DNA, 780 bp, Homo sapiens; identical to SEQ ID NO: 48

SEQ ID NO: 678 - DNA, 4171 bp, Homo sapiens; identical to SEQ ID NO: 50

SEQ ID NO: 679 - DNA, 154068 bp, Homo sapiens
gaattcaagaccagcctgggcaacaaagcgagactcttgtctaaaacaaacaaaaaaaagctgagtatggtggcacgtgcctgtagtcccacttagttgggagactgaggcaggaggatccttgagccctggaggtcaaggctgcagtcagctgtgattgcactactgtactcctgcctgggcaagagcaagaccctgtctcaaaagaaaaaaaaaaaaaaagtggcctgggggaaacaggacagtcatataccccaagaatggaaattttcatgccaccccccttccttccttacaaattctaatgctgattgcatgaacgaggtgttgagagagacttttcttcatttagacatttgccctagtgaatgagggagcaagagaatgctaagagggatgagagaatatatttctggctctaggactttgacatccaggtaattgaatctgggacattctcattaggttagaaaaggaaagatgagaaaatcactagcaggatatgcaattccagagaccatctgctccaaaaattagttttgtttctcattgctccttattcagcgacagttatttcaataagctacattatttagcagagtctgagagacaaaggctgtgaaaacatgtatttatgatagaaaacaaactcagaaaaatataatagatagttcactttttatctcattcacattctatagctggagaactcaaaatcccatttagatatttctgcttatccaaaagcacactgggtgaaactaaaccaccaaatgggagaaaatgttcattgggtgtgtgtggcttcacccagtttatttacctatggagtggaagtgtagggagaaataaggtctgcttataatggtcaaggtctatggagaagccctgaagttgctctccccaaatcacaagtctgattcaagaaaaggaaacaaaaatgatgaaaacatctcatcacacaaaactcagtgatggggtctctgacagtcaccagccagcaggggaaaaggagaaatccacctgccggctttaagatttattgaaggctgccagcacagcccagatcatttctgtggcactaggctttgtcccttccacttcagggtccagttctactaagtccttggctcgattcattgccacatcatacttgtcatctgtcagagaggagaagacattctctagcacatcagaggagtgggctagcaccaggagtgctagtgttcgcttgtccatacgctgagggtcatttacccaccgctctagtacactatcttgaagttttttcactagtcgctgtttctctgttgtattggtcactggatgagtagtcatgtcaaatagcaggaaattctgcttctcagtggttagaatacctttctctactaggttctttgcgatgcgctctcgtacatttctcagctggtactgtaatttgaaggggttccaggtctcacctatgagaaaaaagaaataggacataatgaactgaaagagaaaagcaaaatgaaacatgtagttgtttggaaacttgaatggctaaaatgtttaaaagcataatcttcattcctcaattcatttaatccttagtcctttataatctggctttgactccaaccacatttcacattaaaccagcttcaaaaaatgtcaccaaggacttccatattgctagagcttatagactttatttctgttcttatgtgacctctgtgacactgtaattatttatgtatttttcaaattctatttaggacaccagtctctcccagatgatttctactctatattgtggaagttctatttgctggtgaagctaagaggactgaggttccctaccctatttgtagagcagaagctctatcccaggcctggtaggctgacaatatttagacttcaattgctcccattccagcttgttcgtagattagagattctgcaacagaaaaggcaagtcaagaagaccaggggctaacacctctttcccccagcacctactcatacagcaggtgggtatcactgtaggagaagtgggcccttgtgcagaagttctgcccaggagggaaggaaggcctgaagaatgaagagctccaaagctctgcctgagaggactgactttatttggaacacagtgtggagaattctatgcctaagggtgttgaaaaccatagagatcttggtggagagcaattacaaggtgctgctagctctatggcactggtatgacaaacccaaatggcaaagcctccagaagtttaacaggcagaaccagagaaacagaaagccaagaaaagtccttctggaatcatgaccaacactgggggttgggaagactgtgtgcttgcaccaggctgcacccactcaggagcaatcagagcaggacgtggggcttgacttgagagtattccccagaccacacatagatctatcaaaaaagggtggatgcttcactggcaccaagggctaaagcacaaccactgaaccaacactggctgaacaataagctaccctaactcagaggcaactcctagaaagctaagcttaaaaataataataatagccgggtgtggtggtacacgcctgtagtcccagctacttggaggcttaggcaggaaaacccaggaggcggaggtttcagtcagctgagattgtaccactgcactccagcctgagtgacagagtgagacttcatctcaagaaatgaaaaataaaaaataaaaataaaattaaaaaaatcacatacatccctggtgtatgtccaaggatgtactctctccgagaagaaatcagagagggaacttccaagctgctagttcctcactgaatgtggggcaaaatgtaaactccctgatttgtgatggctatgtcaaaatcacacacacatatccaacagtaaaggataaaaaaatttaattggctaaaaggtcttaagcacaacctttgactaataagtggcttctactgacccactggcaacacacagggagttaggccaaaagataaaaacaagaaaatatgagcagtgacatcagaggctgcacactacaagagaaacagacttcagagagctgctgcaggcaagtcactaaggaaacaaattaccaagcaaacaacacaatcaacctctagtgggaaggagaaaccagtatagcaggtgtccccaacccctggaccatggactggtactggtctgcagcctgttaggaacccggctgcacagcaggaggtgagccatgggtgagtaaagttgagctctgcctcccatcagatcagcagtggcattaggttcccacaggagtgtgaaccctattgtgaactgcacatgggagggatctaggttgcatgttccttgtgagactctaataaatgcaatgcacttgaatcataccgaaaccatccccccgtctcccaccccagtggaaaaactgtcttccacgaaacctgtcctggtgccagaaaagttggggacagctgcagtgtagtatccagagttgcacaattatctaaaatgtccagtttttgacaaaaaagtatgaagtatacaaagaataaattgtgacccattgacccattcagaagaaaaaaagcaggcaatggaaactgcctttgagaacgctaaaatgttggactttacaaagactataaagcagcttttataaatatgttcaaagacctaagggaaaccatgacttatcatatagagaatataaataaagacagaaattataaaaaagatccatttagaccaggtgcggtggctcacgcctgtaatcccagcattttgagaggctgaggtgggtggatcatttgaggccaggagttcaagacaagcctggccaacatggcgaaacgccatctctactaaaaatacaaaaattagccaggtatggtgggcacctgtaatcccagctgctcaggaggctgaggcagagaatcgcttgaacctgggaggtggaggctgcaatgagctgagatagtgccactgcactccagcctgggcaacaaagcaagactccatctcaaaaaaacaaaaacaaaaaaaccatttagaaatcctagagtttaaaagtacaacagactgggcatggtggctcacgtctgtaatcccagcactttgggaggctgaggcaggcggattacttgaagccaggagtttgagaccagcctggccaatatggtgaaaccctgtctctactaaaaatacaaaattagccgggtatggtggtgtgtgcctgtagttccagctactcaggaggctgaggcaggagaatcacttgaacccaggaggcggaggttgcaatgagccaagatcacaccattacactccagcctcagcgacagagcgaaactcaaaaaaaaaaaaaaaaaaaaaagtacaacaaacaaaatgaaaaaatcactcaagggatccaacaagagatctgagctggcaaaataaagaattagcaaacttagagatcaaagaaattatgtaatatgaagaacaaggagaaaagagaatgaagaaaaatgaacagactcagagaaatataaagtatcatcaacttgatgaacatacataaaatggaagcaccagaaggaaaggagagaaagaggcagaaaaaatactcaagaaagtaatggctaaaatcttgccaaacgtgatgaaaaacactcaaccacacattggagaagttcaacaaactccaagttggatgaacacaaagagacccatatccaacatcatagtaaaaatgttgaaaaccaaaaataagtggaaaatcatgaaagcagaagagaaaaatgacttatcacatcacagtggaactttgtaagcttaataactgacttcccattagaaaaaatgcaggccagaagaatgagtagacttattcaaagtgagggtagaaactattagccaagaatcttataactggcaaactatctttcagaaataaaagcaaagcaggtgtggtggcatgcacttgtagtcccagctactcaggaggctgaggcaggagaatcacttgaacccaggaagtggaggttgcattgagctgagatcgtgccaccgcactccagactgggtgacagagtgagactctgtctcaaaaaaaaaaaaaaaaaaaaaaaaaaaaccctaaaaaaaacaaaacaaaaatgaaggcaaagaaaaatttctaaaaaggagaaaaaataaatacattcctagatctgaaagagttcactgctagcagacctgcttataagaaatattaatactaaaactaaagggaagttgttaaggctgagagcaggacacactagacagtaatttgaatccacgtgaacaaacagtaaaagtaattatgtaagtaataaaaaagatggtataattggatacttcatctcaactgatttataaagcaattgcacaaaacaatatttatataattgttattgttgagttataatttttaactttttaaacttttgcgcaaggttataacacatagaaatgtaataatagcacaaagaaagagggtgggaaaaaagttgtgttgaagtaaggaaaatgacaacagatggtaacttgaatccacaggaagaaatgaagaaaaccagaaatggtaaataaggaggttaatataacaaactctataagtatatatttgtgctttcttctcttctttaataattacaacaatgaattgttgaatttgtaacacatagagatgtaatacgtgtaacaatattggcatggtgggcccatgcctgtaatcccagaactttgggatgccaaggtgggcagattgcttgagcccagcagtttaagaccagtctgggtaacatagtgaaactttgtctaaaaaaacaaaacaaaacaaaaaacaacaacaacaaaaaacccaaaagccaaaaaaacaaaaaaaaaaaaaaagaaaagaaacatatagcaatattaacacaaaaagagggagagggaatagagttatatagaagtaaagtttccttggaattaaacttggtataaatctttttttttttatttttttttttttttgagacggagtctcacactgtcgccctggctggagtgcaatggcatgatctcagctcactgcaaccgctgcctgccgggttcaagtgattctcctgcctcagcctcctatgttagatttactggagaaagacttgaaagcaactttttttttttttttttttttttggagacagggtcttgctttgttgccaggctggaatggagtggtgtgatcttggctcactgcagccaccacctccccagcccaactgatcctcccatctcagcctcctgagtagctgggactataggcatgtaccaccatgttcagctaattttatgttttgtagagatgaggtctcactgttgaccaggctagtctcaaattcctggactcaagtgatcttcccacctgagtgtcccaaagtactgggattacaggtgtgagccaccacacccactacaactatcttttgtttttttttttgagatggagtttcactcttgtcacccaggctggagtgcagcggcacaatcttgtctcactgcaacctccacctcccaggttcaggtgattctcctgcctcagcctcccaagtagctgggattacaggtgcccaccaccacgcccagctaatttttgtattttcagtacagacggggtttcaccatgttggccaggctggtgttgaactcctgacctccagtgatccacctgccttggccttccaaagtgctgggattacaggtgtgagccaccgcacccagccacaactgtcttaaagatgctcaaatatttaaaaaaatggataaagacaggaaaataatgtagaagcaaaatgataatatcaataaagagatagagaaagggaccaaaaggaaattctggagctaaaacttataataactgaaataaaaaaatatactaggggggctgggcatggtggctcattcctgtaatcccagcactttgggaggccaaggtgggtgagtcacttgaggtcaggagttcaagaccagcctggccagtatagggaaaccctatctctactgaaaatacaaaaattagctagtgtggtggtgggagcctgtaatccctgctactcgggaggctgaggcagggagaagtgcttgaacctaggaggcagaggttgcagcgagccaagattgtgccactgcactccagcctgggaggcagagcaagacattccgtttaaaaaaaaaaaacaaaaaaacaaaaaacgaaaaacaaatttgaagaagcagaagaaataatcagcaagcagttccctgttaggatacaccctccagatcaacagggaaatattatggctacatttgagccttttccttttaaatttgggaaacgccatgaggggcccgtctgggcctgttccaaaccggggcatttccagcttaggccattccctcatccctgtacaatatctgtcccccgccatagcaggtagtgccgcagtagatttatgctgcacaaaagctgtgagccttctgcctggggaactcccgcaaaaggtcccaacaggagtctgtggacccttgccagcgggaacgataagattacttctaggagatctagtttaagtttaaaaggagtacaaatacatacaggagtccttgattcagattacagtggggaaattcaaattgttatatctacttctgttccctggaaagcagagccaggagagcgtatagcacagctcctgattgtaccgtatgtggaaatggggaaaagtgaaattaaatgaacaggaggatttggaagcacaaataaacaaggcaaagctgcttattggatgaatcaaattactgataaatgtcctacctgtgaaataactattcagggaaagaaatttaaaggtttggtagctataggagcagacatttcaatcatttctctacagcactggccgtctgcgtggccaattcaacccgcccaatttaacatagttggagttggtaaggaccctgaagtgtatcaaagtagttacattttccattgtgaagggcccaatggacaacctgggactattcaaccagttataacttatgtacctataaatttatggagaagagatttattacaacaatggggagcacaagttctaattccagagcaattatatagccctcaaaatcaacatatgatgcatgaaatggggcatgtccctggtatgggactaggaaaaaatttgcaaggtttgaaggaaccacttcaagtggaaagacaaagttcctgccaaggtttaggatatcatttttgatggcagccattgttaagcctccagagcctatacctttaaaatggttaacagataagccaatttggatagaacgatggccactaagtaaagagaaactagaggctttaaaggacttcgttaatgaacaattagaaaacggacacagctccaacattttcctcttggaattctccagttttcgcaattaagaaaaaatcaggtaaatggagaatgttaacagatcttagagccatcaattcagttatacaacctatgggagcattacagccaggacggccttctcctactacaattctaaaaattcgcctttaatagttatagatttaaaagactgtttctttattatccccttagctgagcaagactgtgaatggtttgcatttacaattcctgcagtaaacaacctgcagcctgctaagcgttttcactggaaagtgttgccacaaggcatgttaaacagtccaacaatttgccagacttatgtagggcaaacaattgaacctactcgtaaaaaattttcacagtgttacattattcactatatggatgatgtatttgtgctgcccccactcaagaaatattactccaatgttatgatcacttgcaaaattcgatttctcgtgctggtttaattacagctcctgacaaaattcagactactacaccttactcctacttggggaccttagtaaatgacactaccattgtgccacaagaagtagccatacatagggatcaattgaaaacattaaatgactttcaaaaattactaggggacattaattggatacgacctgctctaggcatccctacctatgccatgagcaatctattttctatccttagaggagatcctagtctcactagccctcggcaattaacaaaagaagctgaggcagagctgcagcaaatcgaaaagcaagtccataaagctaaaacaaatagaatagatccagagaagactctagatttgctaatttttccaactcagcattcacctactggtgttattgtccaagagcaggacttagtagaatggctttttctttcacatactaattcacagactctaactccttatttggatcaaatcgctaccatgataggaaatgggagaactcggattgttaaactataggatatgatcctgaaaaaattattgtccctctcacgaaggcacaaatacagcaggcttttataaataatcttacttggcaaacccacttagctaactttgtgggtattctcgataatcattttcctaaaatgaaactgtttcaatttttgaaattaactaattggattctccctagaataactaaatttaaaccaattgaaggtgctgagaatgtttttacagatgggtctggtaatggtaaagcttcttattctggctctaaaggtaaagttttccagacgccctatacttcacctcaaaaagcagagcttgtagctgtaactgaggtactgactgcttttaatatgcctatttatgtgatttctgattcttcatatgtggttcattccacacagttaattgaaaatgctcagttacgatttcatacagatgaacaactgatgactttatttacccagttagaaacagcagttaggagtagaatgcaccctttttacatcactcacattagggctcataaacctcttcccggacatttaactgaagggaatcaaatggctgattgcctagctgctaatgcaatatctaatgctaaacactttcgcaatttaacccatgttaatgcctctggtctcaaaagcagatacagcattacctggaaagaagctaaagctattatctagcgatgcccaacttgtcaaatggtatattcctcatcttttacaggaggagttaatccttgaggactggaacctaattctctttggcaaatggatgtcacacatgttccctcatttgggagactagcttatgtacacgtatgtgtggacaccttttctcactttgtctgggctacatgccaaatcaggagagtcttctgcctgtgttaaacgtcaccttttgcagtgtttgtggtgatgagcattccagcttctattaaaacagataatgccccaggctatactagccaagctctagctacatttttctctatatggaatattaaacacaatactggtatcccatataattctcaaggacaagccacagtggaaagaatgaatctctccctaaaagagcagttgcaaaaacaaaacatgggggaaacagggattacaggacaccccatatacaactgaatctagcatcattaactttaaattttttgagcctgcctaaaggccagatgttagcagcagctgaacagcatctaaccagctgcaaagacagaagcaaaacaactggtttggtggagagatccggtagcaaaaagttgggaaataggtaaaataataacttggggtagaggttatgcttgtgtttctccaggaccgaatcaacagctgatttggataccatcaagacatctgaaaccttatcatgagccagatgccgaggaagagattccgggaggatcccgaggaccccccggttgcagccatgtcgagactgatgctgaggaggaccccaactgtcattagcaacacccgttgaacacagccacccacctgagggcagatcaagaagctgtcacagatggaggaagaaaacctgaggaaatcgggacaaccagtcgcaatgagtaatttaatggtagctatgatagtggtgatcaccattgctgtgcgtattccttcaacaagggctgacacagagaacaattatactcattgggcatatttatcaatcttggctggcaataatgcctggatgtaatcactctatgatgcagttacacatgctttctgacctcagtatttaccataataaatctgctcctatagttgaggcataccaccctcagaaacctatgtgtaaacaaaattgaacctggccagagaaaatgaacgtacttgtttaggaagattgcattgcagaacaggaagaggtgctgcgcaatgattcttatggaatcattactgattggtcccataaggggatgtttagcttgaattgcacctctcagtttgcgtgtcatggccacactatgttcagctggtttgaacaaaatggtcagatggtagaaatggtaagaagtatgacaagagttcctattatctggaaacatggtggtagagtggcacctcaatctcaaatgatatggcccgctgtaggagctaaacataaggatttgtggaaactattaatggctcttaataagatccaaatttgggaaagaataaaaaaccatctaaaaggacactctacaaacttgtctttggatattgcaaaattaaaagaacaaatatttaaagcatcccaggcacacctgaccttaatgccaggaactggagtgcttgaaggagctgcagacagattaacagctagtaacccattaaaatggataaaaacacttggaagccctttgatttcaatgataattgtgttattaatctgtgttgtttgtctctgtatagtctgcaggtgtggatcctgacttctgtgagaagtagctcaccttgacaaagctgcctttgcttttattgctttgtaaaacaaagaagggggacgtgttgggaataggcctcaaaaatctggccataaactggccccaaaactggccataaacaaaatctctgcagcactgtgacatgcttgtgatggccttgatgcccatgctggaaggttgtgggtttactggaatgagggcaaggaacacctggcccacccagggcggaaaactgcttaaggtgttcttaaaccacaaacaatagcatgagagatccgtgccttaaggacatgttcatgctgcagataactagccagagcccgtccctttatttcggcccatccctttatttcccataaggaatacttttagtaaaccttatgattggcttgctgtcaataaatatgtgggtaaatctctgttcaaggctctcagctctgaaggctgtgagacccctgatttcccactccacactatatttctgtgtgtgtgtgtctttaattcctctagcgccactgggttagggtctccacaactgagctggtctcggcaagattaatatccagaatatatataaagaacctctggccaggcacagtggctcatgcctgtaatcccagcattttgggagaccaagatgggtagactgtctgagctcaggagttcagagaccagcctgggtgacatagcaaaaccccatctccaccaaaaacacaaaaaattagccaggtgtgatggtgcgcacccatagtcccagttacttgggaggctgaggtgggaggatccttgagcccgggagatagaggttgcagtgagccgagattgcaccacggcactccatcctgggtgacagagtgagaccgcatctcataaataaatacaaaaaaacctcaacaacaacaaaacaatcaaacttaaaaatgggaaaagtattttatatttctccaaagaagatatataaatggtcagtaagcacataaaaatatgctcaatatttttagtcattaggaatgacatgaaaactattttcatttgaaaataaaaatcaaaaccacaatgagataacattttaggcctactcggatgtctataattaaaaaaaagaaaagaaagagaagaacaagtggtgatcagcatgtggacaaattggaaccctggtgcatactggtgggaatataaaatggtgcagtctctgtggaaatgtttggtgatttctcaaaaggttaaacataaaactgctatatgacccagcaattctattcctaggtatatatccaaaagaattaaaaacaggaacttgaacagatatttgtgtatcaatgttcacagcagcattattcacaatagccaaaaggtggaaacaaggcaagtgtccatcaacagatgaatggttaaacgaaagtgttatatacatacaacggaatatcactcagccataaacaggaatgaaattttgatatatgctgtgacatgaatggaccttgaaaacattatgcttggtgaataagctagggaaagtaatgacagatattgtatgattctacttatatgaggtacctagagtaagcaaattcatagaaaaagaaagtagaatagaggttgccagggactggggggagagagaaagaggaagttatcatttaataggtacagagttttaatgggtaatgatgaggaagctttgggtatagtatagatagaggtgacggttacaaaatattgcaaatatatttaatttcacagaattgtacacttaagaatggctaaaataataataaatgttggctgggcgcggtggctcacgcctgtaatcccagcactttgggaggccaaggcgggcagatcacgaagtcaagagttcgagacaagcctggccaatatggtgaaaccctgtctctactaagaatacaaaaattagccaggcgtggtggcacgtgcctgtaatcccagctacttgggaggctgaggcaggagaattgcttgaacccgggaggcagaggttgcagtgagctgagattgcatcactgtactccagcctggacgacagagcaagactccatctcgaaataataataataataataaatgttatgtatattttaccacagtaagaatgttactcgttgatttacatatgacccagttatctactcctagctacatacccacaagaaatgaaaacatgttcaaacaaaaacttgtccgtgcgtgttcacagcagcattattcacaatacccaaaatgtggaaataactcaaagattcatcaactgatgactggataaacaaatgtggtatggccatgcaataaaatattatttggcaaattaaaactgggaaattctaataagaataatagactgcatcaatgccaatattctcattgtcctctcaataaagatgttttaaaagtttcttgtgaagaatactatttaagggcttttggggtggggtggcagaagataaggtgaagctttggaaaactttaggtatcaattaaccatgctttttctgtccctcattagaattaaatagtgaaccacatctatctcatccagcacgatgaatttcggtacatcttttactaaatttcagggtaggataaagataacaaagtgtgaaattcatatattattttaagtcatcttaccagtgagtagctctatccatgtttggacagtttctgtgggttcagttgctttgatgtgtttcagagtttcatccagtaaaacatcacctgttgggctgtctgactttagcagtacctttgagaaaaggagaaagaaggaaccctgattccttcacttcattcaagttaaaatctttcaatatatcatgtatatgttactggttaaaaattgcaagaatgtaaggaagcataatatactgtctctgtcctcaagaagtttaaaatatagtatggagtgatagtgcaaagacaaaaataacatttgaagtgggccctagtgacaaactggatatgaatgataatggagaaaagtttcaataacaactcattttgagtctggaaaccaacttttgaaaccattaataaaggtaggaaacagctgggctcagtggctcatgcctgtaatcttagcactttgggaggctgaggcgggtggatcacctgagctcaggagtttgagaccagcctgggcaaaatggcaaaatcttttctctattaaaaaaataaaaatttaaataaataaataaataaataaacaaaggcaggaaagtcagaaaaggaagtcagttttggggaaaggttgataatttggttttctttcatttttgttaagtttggttttaaatgatatgggatagccaagttgaaatttctagccaatagttaaatatgtttctggaggtggaaaaacaagacctgcctagaaatttgaaaattaatctcatgaaggtgacagacgaagctataaaggtaaatgatatctctgaaaggacagaagatcactcaagtgatacaaactgagacttggatgttaagaaatggagaagtaaggaaacagtgtatagtcagagaagcaagagaataagataataacaaaggccaataatgaagaaagtttcaaagtgataaaaagtgtcaaatgacacatataggttaaaagagaaaaataaatcaaagactgaaaagaagctggtgatacctaagaatgtagtttaagtggagtgcttaggatgataaagaagttgtgagtggaaaaattcagtaagaaaatggatacaggagtatggttggaaaggacttgcagtaaatggaaggaaacagaatattattggagaataaccagggttaatcaatgactgacctgacccatatgagtccctctccctacatcatactctatttcgtaattttttttttttagagacggagtcttgcactgtcccccaggctggagtgcagtggcgggatcttggctcactgcaagctccaccttccgggttcacgccattctcctgcttcagcctcccgagtagctgtgactacaggcgcccgccacaatgccccgctaattttttttttaaatatttctcgtagagatgggatttcaccgtgttagccaggatggtctcaatcgcctgacctcatgatccgcccgcctcggcctctcaaagtgctgggattacaagcgtgagccactgtgcccggctatttcataatgttatagctatagatataggaggaatttaatcaacagcatcctgagtatgatttttctgcataaaaaaggaagacaaaaccaggagcttcctataactctttggactatggatactttgatttctccctcttgcaatagggtaattaacctgtttagacaatggaactgctgagtcagtgatatttattttatcttactactcaaatctttctattcttcccaaatgtactgttggtatttgcctttccataagccatggacgttcacagaggattcagtacctttctgtctagtagtcgcttcttacgcatggtcgggggttccagatagattcgaccccgcatggccagctctatcaggatgccccctcgcaggcctgatgatatgcagtcattccagaaagatgtgtacccctaggaaaggagaaaagagaagagaaagaatgttttgagaggaatactgacttccagcaggcaccctaagaacaggccgctttgttgtgattcgtttcacatcatactacatgaactcaaagtatagagtaagaggatgtttctttaatcctcttaaacacccccaaatatgattttctgtctgacttcaagatctttagtgaatttccatggtttgctgttagtcaataaatgatgtgcaatttttttttttgagacagggtctcgctttttcccccaggctgaaatgcagtggcatgatcatggctcactgcagccttgacctcctgggctcaagcaatccttccacctcagcctcctgagtagctgggactacaggtatgtgccaccatgcctggctgtttttaaaaaaaatttttttgtagagacaaggtcttgctatgttgcctacgctggtctcgaactcctggcctcaagctatcctcccaccttggcctccgaaagtgttgggattacagacatgagtgactgcacctggtttgacatgcaaaattttaatttttgaggagaattttggcttttttgaagtctgtttccatgacacaaaatttcagagtggggtaaaataagtcagaaaaaagtaaaaagcatttgagcttttaatcctcctagatatgtattaatttgaagttcttttttcttttttttgagatggaggcttgctctgtcgcccaggctggagtgcagtgacgtgatcttggctcactgcaacctccgcctcccaggttcaagcgattctcctgcctcagcctcctgagtagctgggattacaggtgtgcactgccacacccagctaatttttgtatttttagtagagacgggatttcactatgttggtcaagctggtctcaaactcctgacctcgtcatccaccagcctcagtctcccaaagtgctgggaatacaggagtgagccaccgtgcccagccaatttgaagttcttttgatgggaggtataatagaaacccactgtcattaagtgccttggttatgttacttaaactttctgaagtacattgtcctcatctataaaatgcagacaccaatatatattttcataagattgttatgagggttacatgagatacaatatataagaaagcatttagtatagtgcctggcatatagcaggcacttaaaatgttagctccccttccctttgtatagggaatatacgtataagagagccactggtattgtctaacagcagtaacgtttaattactaatgtctattgaatacttattatatactagatatgtgctaatacttattatgtactagatttgtgctaagctttttacatgcattatctgattatatcttcacaacaaccctataaaggaagtactactactacccacacattaaagatgagaaaactaaggcttacagaggttatacagcataacagaggtcacgaagctaaatagagaaatttttaagtggttgtttttttggtggtgttttactgatagatcatagttgtgcatattttggggttactttttttttttaagagacaggcggggtcttgctccattatccaggctgaaatgcagtggggccatcatagctcactgtagacttgaactccagggctcaaacaattgtcctgcctcagcctcccaagtagctcagactacaggcatgagacactgcacctagctataataactatttaaaaaattttttaattcaattttcctctttattggcttggaagttatgtacttttagaagttatccttgaaattttaacatgcatgatacattaatttaaaattaacataaaacctaaattttaaatattaatattttaaccactcttttagttgtccagtatttttttttagcctcataaattagatatcatcatcatcattattattttatacaggtagcacttgtttagatttacacaggtgcttacgaatttctttgctcaccgttccttcctgtatctcagacttcctttctggcaccatttttcttcttcctaaagtagaatttccttaagtgaaagtctgttggaggcagtttctattttgcttatctgaaatgtctttgtatttcaccatcatccttgaaagatagtttctctggacataaaattccaggttgatcattccaggttatcacattgaagatagtatgccctcttcttccagcttctaatatagcagtgagaaatctatctttcttattgattgtggtttttttgtaggtggtgtatcttttctttggtcctttaagatcttctcttttggtgttttgcagttttactataacatgactgtgcatgaatttatttattctgtttggtatatgttgtgcttcccataactgtggtttcatttcttagcttcaaaaattctcagctcttaggtctctaagcactttggctctcctttattttcttttttctttccttctaggacttcagtctttattttaaccccgtcttttaaccttttatattttccatttgcttgttctctgtattgctttctggagagtttttgtttgtttgtttgtttctgagatggagtctcacctgtcacccaggctggagtgcaatggcacaatctcggctcactgcaacctccgtctcccaggttcaagcaattctcctgcctcagcctcccaagtagctgggattacaggtgcacctcaccacgcctggctaatttttttgtggagatggggttttatcatgttggccaggctggtcttgaactcctgacctcaggtgatctgcctgcctcagcctcccaaagtgctggaattacaagcatgagccaccagcctggcctttggagagtttttaaaaaatatccggcttcctatttactaattcaaactaaccctgagattttgatttcaacaatttttcattagtagaagttttatttagttatttttcacatttgtctggtgatttgtgattttttgtttattttgtgattattttatttctttaaaaatgtcatatttttagtctgattattttaatatgggacaatatatgaggtccttgatacctgacaatatctgaggactttatttgtcacttcttccttgtttgtatgtttgatgatctttgattaagaggttcacgtttaacgttttgtgaatttacgagattctggaggcctaaattgaggacatcttccttcagagggaaagatctgtttctgccgagagccaagtacagagggattgtgggagtgccacacaactgggagcacatttaagcctagtttccccactttacctcaaccatcaagtttattcctgaccaaccaactcctgaatctcaagactgatttggtaatttgccccagggtaatttgatcttcatgttatctttattgctcacctcttggattttaattttggtgtttgggggccccttgaagattatttctactttccaagactcaataatacattaaaaattaagcttattcaagacttaatatctgaccaccatactgccagggctagaggacctctaattctatttgtcctgctatagccaggacaatctttaacatcaagtgtaatgatataactccctcccctcatgcttaaaaatctttcaaacattcctctcagccttcaggatggaatccaaatggctaatgcaggaggatcgcttgaggccaagagttggccagcctttgggaacacagcgagaccttgtctgtaaaaacaaaacaaaacaaaacaaaagtggctatttactagtcttttctttttttttctttcttttttttttttttttgagacggagtctctctctgtcacccaggctggagtgcagtggcgcaatctcggctgactgtaagctccacctgccgggttcacgccattctcctgcctcagcctccgagtagctgggactacaggcgcccgccaccacacccagctaaatttttttatatttttggtagagatggggtttcaccgtgttagctaggatggtcttgatctcctgacctcgtgacccgcctgcctcggcctcccaaagtgctgggattacaggagtgagccaccacgcccggcccactagtcttttctttggcctctttcccctattggcctttgcacacactgctctgttgaaaagaaccaatattcttccttccaaaactcctctttgtagttaagcgttaagtacaggggtcacatttccacataaccttctctaacattgtttacttctccactccaccctctggattaggttctgcacctgggtgtgcccatacatacttctctcataacttctattatatcatattgcaaacaactatttctcctgaccagactacaaattccttaaggagagaatatcccttatgccgcaaaaatatttttgaaagcataaatttatgcttaaaagtaaatgttaacctggcaaaagttcagcttgagccataaaatattccttagacatctccaaatttcctgagggtctgatctttgactcaaggttgggattagttccctcccctgcctgcctcatggctactccaagtcatatttgtttttttggttttgtttttgtttggacacagggtatcgctctgtcgcccaggctggggtgcagtggcatgatctcatctcactgcaacctccacctccctggttcaagcaatcctctcacctcagcctcccaagtagttgggactacaggcgcgtgccaccacacccagctaatatttgtatttttagtagagatggggttttgccatgttgcccaggctggtctcgaactcctcagctcaagtggtatgcccacctcagcctcctgaagtactaaaattacaggtgtgagccactgtgcctggccccaactcatatttgtgactcctctttaaggaaggggtaggctttttttttaggttaacacttgtttttttttatagtttagctacctaattaaagttaaactataacttccttcagaacacgtaattatgtaggcattatttattctcgtaataaatcttaacaggtgtgcaaacattttagccaatattaaagcaactggaagaaagttttcttttgttgtctcatttcctcctgaccatgtaacttctgtttcagtgacagtgacatcagattgtcaacaaaactataaatgagaagcagtataaagaaatgatgaagatcaggataaagaaactacatttttgaatgtcacactttcctattgtagcatctcaaaacatacaaaactttccaaacgagtttttaacttttttattaagaatatgcaataatagacaaaagtataaaaacatatatgtagagttttaagaaaataattataaaacaaacacctgtataactacaagaaagagactggatttagaaaaagaaaataactgagaaaagagagaacatgatagtaaatgttcccctgtactgtgggtacatatgaccaataaagattataatattgtcatctatagtaatatttagaacagattgaaacaaatttaggtgcagaatagcctggaggtaagggaaaatacaattatttatatttaaaggtcattttcctcttagtgtatctatctaacttagtgaattctccagccattcataataaagattctatattaaatggccaatgctttggtatgtctgagcaggaagacctagcacgtacatactaaagttcaccatttgatcattaaatctcattaccaaaggctatctaaagaaaattttaggacctacccaacacagatggaattgcacattgtctcatggctaatggagaatctcagagaatttgcagaataagatattcagatagtggactttaatatacatctgtaggccgggcgcggtggctcacacctgtaatccctgcactttgggaggtcaaggcgggtggatcacctgaggttaggagttcgagaccagcctggccaacatgatgaaaccctgtctctactaaaaatacaaaaattagctgggtgtggtggcacgtgcctgtaatcccagctactcaggaggctgaggcaggataatcacttgaacctgggaggtggaggttgcagttagctgagatcacaccactgcactccatcctgggcaacaagagcaaaactccgtctcaaaaaaaaaaactgcaggcccggcgtggtcgctcaggactgtaatcccagcattttgggaggctgacgtgggtggatagcctgaggtcagcagttcaagaccagcctggccaacatggtgaaaccccgtttctactaaaaaatataaaaattggccaggtgtggtggtagacgcctgtaatcccagccactcaggaagctgaggcagaagaattgcttgaaccccagaggtggaggttgcagtgagctgagatctcaccactgcactccagcctgggcgacaagattgaaactccatctcaaaaaaaattgtaaaaaagaaagaaaaatcccattatagaaatgtatactttaggctgggtgtggtggctcacgcctgtaatcccagcactttgggaggctgaggcgagtggatcatgaggtcaggagatcgagaccatcctggctaacacggtgaaaccccgtctctactaaaaatacaaaaaattagccgggcgtggtggcgggtgcctgtagtcccagctacttgggaggctgaggcaggagaatggcatgaacccaggaggcggagcttgcagtgagccgagattgtgccactgcactccagcctgggctacagagcaagactctgtctcaaaaaataaataaataaataaaaagaaatgtagactttagaaagtgaaagtgttctagaatcttatcccctctagaggatcactaccaacagtttaatgggtacttttctagatttttatatacatattctatgtttacacttattaatattatttctagaaatggcattacactgagtggtaacttttttcattaacccattattctgggtatcattccacatcagtaaatatacttcttcatcccttgtaatgactgcatagtattgcattttacatgcattataattttatctatccaagccccttactgatgtgcatttaggttgcttacagtattttgttattattaaaaaatgttggctgggtgtggtggctcaagcctgtaatcccagcactttgggaggccatggtgggtggatcacctgaggtcaggagtttgagaccagcctggccaacatggtgaaacccagtctccactaaaaatacaaaaaaattagccgggcatggtggcccgtgcctgtaatcccagctactcaggagggtgaggcaggagaatcctatgaatccaggaggcagaggctgcagggaggtgagttcgtgccactgcactccagcctgggcggcagagtaagactccatctcaagaaaaaaaaaaaaaagtaaagacgtattcatttgtgtgtgtatttctgttgaatatctagaagaaaattctgggtcaaatattacacatatttaaactttaaagattgcacaatgggaattcaataaattcagacagtcaacactttatgctgaatttccacttagtcaagtattcaaagtgcccttccttattcaaacttccttgaagacacaccttaaaacaactctgaaggttaaagatcttaaaagttgcctgcttggcaaaaaaagaggaaagaagggccgggcgcggtggctcacgcctgtaatcccagcactttgggaggccaaggcgggcggatcacctaaggtcagagtttgagaccagcctggccaacatggtgaaacactgtctctactaaaaatacaaaattagccgggtgtggtgccgcatgcctgtaatcccagctattcgggaggctgagacaaggagaatcgcttgaacctgggaggcggaggttgcagtgagccgagatcgcaccactgcactccaacctggacaacgagagcaaaactccgtctcaaaaaaaaaaaaaaaaaaaaaagaggaaagaaaacaaaacaacttaaagcatcattaaaaaatatgctcataaggagtttttaaaataacattagaaaatacttgtgataaagttgaatgaaaaatagccagatatataattgagtatccaggattattacaatgatataaaataatgtctacattaaaacatggctttttaacctttccaaattatctacagtgagaaaatatcactttttaaaggaaaattttcagaaaaaaagaacccctccatctccccaagtctgaagatttaacattaaaattgcttcaccttccatgagagaagaaatgttatcatgttgctttgaacccttttatatctgcccaattccaaagcccaaggaaagtataatgatcttcaggggttatcaaaaattctacaagcaaaactaattttattatttttttcctcctaaaaaattactctaagaaaatttagtgtactgtttgtccttgaatcactctattaaaagagtggtattcaggatttgatgtaaattcctcttttacaaattaatgtgattcatcgaaactccaattcctatttctacatccacacagctcataaagacattttatgtatgtatgtatgtatttgagacggagtctcaatctatcgcccaggctggagtgcagtggcacaatcatggctcactgcaacctctgcctcccaggttcaagcgattctcctgcctcagcctcccgagtagctgggattacaggggcctgccaccacattcagttaatttttgtatttttagtagagacgggacttcatcatgttggccaggctggtctcgaactcctgacctcaggtgatccacccacctcagcctcccaaagtgctgggattacaggtgtgagccactgcacctggccaagagattttataaaatagatcaagcattaaaagcccactctgtttaatcctattggagaatgaagaactgtgacctgatgctgttctggtttaacagataatttcagcctgatcgtgaggaagggattataaatataggcaaatggacaggatttctcaatgaatgaaatgaagattgaatcctttcaggtttattttaaaaggtgggtagaaagatgcaaagctagttacaatgatcagtttattagtttttgcagggcttctgttttttttttccttatcaaaagtttagcaaataaaaacaacatgctaatgcgttgtcagtgaaagggaaatgcaaaataaaggaaagcaactggtcatctttgaattcccatataagctttaaatctcattctggtcagtaaaaatatcattagttgttttaccctaaaaatttttattttttttattttttagacatagtctccctctgtcacctaggctggagtgacctggccggaaagaggaattttaattgctacacattgtccaaagaaaacggaagaaaagccaggcgcggtggctcatgcctgtaatcccagcactttgggaagccgaggcgggcggatcacaaggttaggagttcgagaccagggtggccaacatagtgaaaccctgtctctactaaaaacacaaaaaattagctgggcaggcgtggtggtgggcacctgtaatcccagctacttgggaggctgaggcaggagaatcatgtgaatcaggaggcggaggttgcagtgagctgagatcgcaccactgcactccagcccgggtgacagtgcaagactccgtctcaaaaaaacaaaacaaaacaaaaaacaaaagaaaacagaagaaaagagaaagttgagaagggggagcaaaaatttgaaaacaggccaggctcagtggctcacgccagtaatcctagtactttgggaggccaaggtgggagtactgcctgagctcgggagttcaggaccagcctgggcaacacagtgaaaccccgtctctaccaaaagtacaaaaaaaaaactggccgggtgcgtctgtgggtcccagctacttgggaggctgaggcaggagaattgcttgaacccgggaggtggaggttgcagtgagccgagattgtaccactgtactccaacctgggtgacaaagtgagactcccatctccaaaaaaaaaaaaaaaagaaaaaaaatggaaaacatgtccaggctctaagtctatctccccacaactcacgtgatttttttaaacaataaaatatttatcaatttattcatccacttatatttagcttgaatctgagtgacttatggaaattttagaaattaaaatccatccccaaaacaaccaattatagtatcattacaataagtatttagccatcttaagggacaacttcaaaagaggcagtactcttttgaatatagaagttttcatatgtttgttaataagagcaaaataaactatcattagagtgaacaggtaacctacagagtgggagaattttttttttttttttgagatggagtctttctctgtcacccaggctggagtgcagtggcatgatcttggctcattgcaacctccgcctcctgggctcaagcgattctcctgcctcggcctcccgagtagctgggattacaggcatatgtcactaggcctagctaatttttttgtattttgagtacagacagggtttcaccatgttggccagggtagtttcgaactcctgacctcaggtgatctacctgccttggcctcccaaagtgctggtattacaggcgtgaaccaccgcactcggcctttttcttttttttaaagagatgaggtcttggcctggtatggtggctcctacctataatcccagcactttgccaagctgaggcgggaggatagctgaggcacgaggaccacttaagtccaaagttcgtaaccagcttaggcaacatactgagactccatctatataaaaaattttaaaaattagccaggtgtggtggcacatgcctgtagtcccacttactcaggaggctgaggtggaaggatccctcaagcccaggaggtcaagggggcagtgagccatgatcatgccactgcactctagcctgggcaagagagtgagaccctgtctcaaaggaaaaaaaagagagaaacagggtttcactctgtcatacaggctagagtacagtggcacaatcatggctcactgcagcctcaaactcctgggcttgagttatcctcccttgtggttaggactacaggtgtgtaccaccacgtctggctaattaaaaaaaaaaatttgtagcaatagggtctggctatgttgcccaggctggtgttgaagacctggcctcgagtgatcctcccacttcagcctcccaagtagctaggattacagatgtgagccacctggcctggcttccaatgatttaaaacggacttagaaacacaagcaattatgttacgttcaaaccttagaagagcaaaactaggtaagtgtagattttttttttttgtggtcaaatagcttttctctccttgattactagcatatacacattgtagaaaatttgaaaacaaaaaaattcataaaaaataaaaatcacccataaattccattaccctatgatcatatgggtgtatgtacaaccaaacttttctgtatacataaaatacatgtatcttctacccatcaacctattttcccatctccttctctcccaaccccaattctggggcgtcccttcatagcaaaggtttgtgtgaattatggaacaacagtatgatatatatgttataaacctcaacaaaatattaccagcctgggcagcatgttgaaaccccgtctctactaaaaatacaaaaaattagataggtgtggtggcatgtgcctgtagtcccagctacttgggaggctgaggcaggagaactacttgaatctgggaggtggaggttgcagtgagccaagctcgcgccactacaccccagcctgggcgacagagtaagagagactctgtctcaaaaaaaaaaaaaaaaaaaaaaaaaaaagtattgaggagtagagatagaagaaactgcgaagagtactgatttcatcatctttcactacagggagtcagtaggatattgtctaaaactgagtaatgtggtaagaaaacacaaccccaatttttttttaacatttttgattgaactcctccctccctccctcccttcctttttttttttgtgtctccctttgtcactcaaccaggctgcagtagaggtgcagtggtgtgaacatggctcactgtagccccaacctcctagactcaaacaatcgtctggcctcagcctcctaagtagctggaactaccagcgcatgccaccatgcctggctaatttttgtattttttgcagagacaaggttttccgatgttgcccaagctagtctccaactcctgagctcaggtgatgctcctgccttggcctctcaaagtgctgggattacaggctgagccaccatgcccagccaacagtttcaaacatacacaaagtagagagattatgtagctctatgtagccatcacctagtttcaacagttatcaatataatctttcatctttaccacccaccccacccaaacccagattatttctgtacaaattccagctactatataatttcatccaaaaaatactgcatattctccccaagagattaggattttttaaaaaaagaactgtaataccaatatcatacctaaaacaacccaataagaactccagtaagccttcatattccatcaattgtttagtaaatttttttttacagttgctttgtttgaatctggagccaaagtccatacttagtcttctgtatttcatacattctatttttttttttttttttttgagatggagtttcactctgtcacccaggctagcaggctggagtgcaatggctcgatcttggctcactgcaacctccgcctcccgggttcaagcaattctcctgcctcagactcccgagtggttgggattacagccacccgccaccaagcctggctaatttttgtatttttagtagagactgggtttcaccatgttggccagggtggtcttgaactcctgacctcaggtgatccacctgcctcagcttccaaaaaatgctgggattacaggcgtgagccaccgtgcccagcctacatgtgtaattttaaaagtaaaatgaaatataatttcatttcatttggggcctcagactcccaaagtgctgggattacaggtgtgagccaccgtgccaggctacatgcgtaattttattttattatttatttatttatttttgagatggagtctcactctgtcacccaagctggagtgcagtggcgcgatcttggctcactgcaacctctgcctcccgggttcaagcaattctcctgcttcagcctcctgagtagctgggattacaggcatgagccaccgtgcctggcctatttatttatttatttttgagacagagtctcgctccattgcccaggctggagtgcagtggtgtgatcttggcttacggcaacttctgcctcctgggtccaagtgattctcttgcctcaacctcctgagtagctgggattacaggcgtatgtcaccgtgcctggctaagtttttgtatttttagtagagatggggtttcatcatgttggccaggctggtcttgaactcctgacctcaggtgatccacctgcctcagcctccaaaaaatgctgggattacaggcgtgagccaccatgcccagcctacatgtgtaattttaaaagtaaaatgaaatataattttacttaacagaaaaaaaatgaagtgaaacaattactaaacttcaaacatttcttttttttttttttttaatttgagacagggtctcactctgtcacccacgctggagtgcataatcgtagctcactgcaccctctacttctcgagctcaagcaatcctaccacctcagcctcctaagtggatggaactacgggcacatgccaccatgcccatttaatcttttaattcttttagagatgagggtcttgctatgttgcccaagctggtctcaaactcatagactcaagtgatcctcccaccttggcctcccaaagtgctaggattacaggcatgagccaccacacctggcctcaaacagttgtttcttataagagatatgtcatgatgttggctatgggttatcaagtaaaaaggaaaaaaaaatttttttaaagagaaatgtggctgggcacggtggctcatgcctgtaatcccagcactttgggaggctgatgtgggcggatcacctgaagtcaggagttcgagaccagccttaccaacatggagaaaccccgtctctactaaaaatacaaaattagctgggcgtggtggcacatacctgtaatcccagctactcgggaggctgaggcaggagaatcacttgaacccgggaggcggaggtttcagtgagccgagatcgccttgggcaacaagatcgaaactccgtctcaaaaaaaaaaaaaaaaaaaaaaaggacaaatgtcctataaattcctttctaagatttaaaaaagagattattaagaggttggggtcatttttaaaaactagatgtttcaattttagataacgtctaagtgactccttattatgaaagatacaagttaatatccttcccatattttattaccttacttcccaattttaaaattataacttttattctgtgtagactcataatatgtatattctattctataactataattcaccagatctgctctactttatctgaatgtatgcagagagagctgatgctggttacatgagagtttattatattgttttttacacatttttgtatgcctgaattatttgtaattttgaaaaaaaggaatgttttaaactaaaaaatgatgtttggcggggtgcggtggctcatgccaccgaggcaagcagatcataaggtcaagagatcaagaccatcctggccaacatggtgaaaccccatctctagtaaaaacacaaaaattagctggtgtggtggcacacgcctgtagtcccagctactcgggaggctgaggcagaactgcttgaacctgggaggcagaggttgcagtgagccgagagccaagatccagcctggcgagggagcaaggctccgtctcaaaaaaacaaaaagtttaagaatatttacagtatttctgggaagtaagatttcttctttttttaatgttgttaattatacttccctctattgcttaaattctttatcaagagcattttttcctaaaacaaacaggaaaaacaagtttgtgtgaaccttcacaattttaagactggtattattcccttaaatctttcttatgagtgaaaatgttaaaagggtgatagtgctgagaaagatttgtcacataagcataaatagtacaattagatgcatacatagaatgggcagtggtattatgtctgcagtattctacttgaccaacccaaagcactaccccaaatagcgaagtacagaagctcagaaatcacagcacagttttctcactattctactaggcaaaaattctagattaaagttgaaaatgaaatctagaatttagtcttctggcagacatttaagttcctcacctattaccaaaatgaaagaccccaaaacttaattgcatgcagtcacaaatcttatctcaaaagttaattagccaaaatttaaagctggttagaaataataaaaagggctgggcgcaatggctcgcacctgcaatcctagcactttgggagaccgaagcaggactgcttgaggtcaggagttagagaccagcctgggcaacaaagtgaaactccctgtctctacaagaaaataaaaaaaattagccaggcatggcggcatacgcctgtagtcccagctatttcggaggccaaagtgagaatatcccttgagcccaagaggtggagcctgcagtgaggcatgttcgtgccactgcaccccagcctggacgacagagtggagactgttaccaaaaataataataataataaaaaggccaagtgtggtggctcatgtctgtaatctccacactttgggagactgaagcaggcagatcacttgaggctgggagttcgagacccgcctggctaacacagtgaaaccctgtctctattttaaaaaaagaataataataaaaaaaagaataaaatgattattgctaaatttttatcgactcctaattcagatgaatttaagagctagactccacagaaatgattccttatttagcagagggaacaaaatccagagaagtagggagtttcaacaggacgcttctgcaacagtttagattggaggtaataagataaagaagcaaaaatgggaatggaaaggaggtatcaatggcaaagagtgcagatctaagactgcaagaattctttcatgtatttccaactctggaactatcaccagtacccagagagaggtatatgaaaacaaaataaactgttatccttcctctacacctcaataattcatctaaaatccctagaagccacacataactaattcagatatcaagtgggtttcctatcccccagattatatccccaagtaaattaagagttttttttaaaggattatacattatccaagtaagaaaatagtgaacaatcgtatttacttttttttcatcctatgtgtgaggccgctgaaacaaaagtcaaagattactaagaatactaggttaggctctcttctaggaaacatttttcagtgccctcttgttccaataactaaggtcaggccattggttgctcagtttgtaagagctgattcaactgatcattttcaagtcaaaaaataagaaactactgctttgaaagtttaaggctatcctacagatatttactttaaagcatgtaagtggctatttatgcccagcattcaactaaggtctctctggccataagaaaatgaccatttaattaagagccaagactaatggtttaaacaacaacaaaaacataataataatggttattatttattgagcatttacatgtgtcatgctctgagttaaaatttttatataatcaggctgggcgcagtggctcatgcctgtaatcccagcactttgggaagccgaggcacctgaggtcaggagttcaagaccagactgggcaacatggtgaaaccctgtctctactgaaaatacaaaaactagccaggcatggtggtggacacctagaatcccagctactcgggaggctgaggcaggagaaccacttgaacctggaaggtgaatgtagtgagctgagatcgcaccactgcactccagtctgggtgacaagagcaaaactccgcctcaaaaaaataagtttttaaaaatataattagttaatctaatcctacaatagcactattaagtcaatattatctctattaaataagaatgaagggaaaaaatgtgaaaatggagcccaagtcatatagctgataagtggtagaaccgggatttgaatgtagatgtgtctgattccaaagcctgcgcttttatccactgctgataaaaaaattagaaaataaaagatggttactaagcacactgagaggtatgataaatgcaagagaattcagagaatgtaaagttcagtgctggatttgtgatgggctttaaaacaaaatatgggaaggaaacatggcaggaatatataaaatagacaaatgggactggagtggtaagtagactaagcagcgagaaataaggttagtcagatgaagtggggcttagaaagccaggaaaacacagtcctgctctcagggaggttgcagactaaccttaaagttaataataatatacatttattcaatggaatcctatgaaaccattaaaaataatggggtatgtttatatttattggcataaaatatgtccacattataatacttggaaaaagaaggctacaaaatgatatgtctgattataatcaattttttggtaattatgcatctgtggctgggcatggtggctcacacctgtaatcctagcactttgggaggctgaggcaggtggatcacctgaggccatgaattcaagaccagcctggccaacgtggcaaagccctgtctctactaaaaatacaaaaattagctgggtatgtggcaggcgcctgtaatcccatctactctggtaactgaggcatgagaattgcttgaacttgggaggtggagctttcagtgagctgcaggtaccacggcactccagcctgagtgacagaggagacaatgtctcaaagaaaaaaaaaaatgatgcatctgtgtatacatatatatgcactgaaaacagtctataaggatatatattacaattttaacagtagttatctttgggaagcaagattataggtggtttttattttcttctttacacctttaaaaaaaggtataatttacatagagtgaaatgcatagatgttaagttcagtgagttttgacaaaagcatatatccatgttatctcacaccccaagcaagatctgcaacacttctatcatcccagtaagtgttctcatggagggccaggagcggtggctcacacctgtaatcccagcactttgggaggctgaggcaggtagatcacttgagtctaggagtttgagaccagcctgggcaacatggcaaaatcccagctctataaaaattacaaagaattagctgggcgtggtggcctgcacctgtagttccagctacttgggaagctgaggcagggggatcacctgctcctggggaaggtgaggcttcagtgagccctgatagtgccactgcactccagtcttggtgacagactctttctcaaaaaaaaaaaaaaaaaaaaaaaaaaaaagtgttctcatgtagatctctgtctgaatttcttagggtaaatgtatttcacttttaaagtatcaaaaagtaataaaattacttttatatcttagacaaattttaaaaactaactaaaaaagaaaacaaataaaaaagagaatacagtaacctcaaaccctttgattcagtatttttttctatttgccattcctaccttaaacttcttggacaactgtgaataggtaaggtcaaacagagaaaataaagaataactggcacggactttcttccttttccatgttcctatagcatttttttggtacctttctcctagtacttacatactgtgtctagctgtatggttactgcataaatatcttttctcctctatcaaatccctatgcttctgtaggaagataagcgcatcttacttacttttatattttccttacttttctcagtgccttgcatcaaggaggtactcaaggccgggtgcagtggctcatgcctatagtcccagcactttgggaggccgaggcaggcagatcacatgaggtcaggagttcatgacctgcccaggcaacatggcgaaaccccatcgctattaaaaatacaaaaattggcctggagcggtggctcacgcctgtaatcccagcactttggaaggccgaggcgggcggatcacgaggtcaggagatcgagaccatcctggccaacatggtgaaaccccgtctctactaaaaatacaaaaaattagctgggcgtggtggtgggcgcctgtagtcgcagctacccgggaggctgaggcaggagaatggcgtgaacccgggaggcggagcttgcagtgagccgagatcgcgccactgcactccagcctgggcgacagagactctgtctcaaaaaaaaaaaaaaaaaaaaaattagctgggcttggtggtgggagcctgtaatcccagctactcgggaggctgaggtaccagaagtacttgaacccaggaggcggaagcagcgagccaagatcacgctgctgcactccagcttgggtgacagagcgagactctctctcaaaaaaaaaaaaaaaaaaaaaaaaaaaaaaaaaagagagatactcaataaatgttggctcacttgagctggagaaaaaaaatcacatcattagacaatttaatgatacttcctgagagtgagctgtccttcaggcggatgtacataaataaatatgcaattatcttcataacctattttttctaaaacctttctaaatcattgttatgagctgaattgtgtcccctcaaatttcatatgttgaagttataacccccattacctcagaatacatctgtctttgaagatagggcttttagaagaggtgattaagttaaaatgagggtgttatagtgggccctaaaccaatctgactggtgttcttttgagaggaggaaatttggacacctagagacgccaggaaggcatttgcatagaggacacagcaggaagtctgcagggcaaggtgagaagtctcagaagaaaccaaacccatcaatcttgatcttggacttctaatccctagaactgtgagaaaattaatttctgtcatttaagccaccaagtctgtggtattttagcagggcatctttagcaaactaatataatcctactctcacagaaaaatctagaagaggcttgtctagtcatttagtcttaagcttttttaatgttttatttatttttagagacagggtctcactatgttgcctaggctcgtttcaaactcctgggctcaagcaatcctcctgcctcagcctcccaaagtgctgagattaaaggtgtgagacatgatgcccagccttggttttaagctttaagatgcaagaaaaaataactatttgcttactcatatttatctctttttagtataatagtgtctccctccttccataaggaacatgtgtgacatgggttctaatctatagctgaagagtgaactgacaagaaaaataatgactatttgtacactagaccttctgatgtgattattttaattttttttttggagagagtttcactcttgctgcccagactgtagtgcaatggtgcgatctcagctcactgcaaactccgcctcctgggtttaagcaattctcctgcctcagcctcccaagtagctgggattacgggcatgcactaccacgcccagctaatttttgtattattagtagagatggggtttcaccatgttggccaggctggtctcaaattcctgacctcaggtgatccacccgcctcggcctcccaaagtgctgggattacaggtgtgagccaccatgcccagcgataatatgataattataattaaatattatttacttattcgttaaacatatcttccttttgccagttgggttattcaaacttcttacttggacttgttgccctttatgactagaatatcttgtttcaaaaaggagaagagaaaaataatgtatagaattttcctatttcctccttaatatttgaggcaatggaatggaaaatttgaagtaaaaataaaactaataaaatcattcagaattccttacagtagtattttccctttttctgacattattgatgcctagttaatgttttttataggatcccaaaatctttttccaggagtgagctttgctggggtattaaacatttgaacaagaaagatatggataagacctgaaaaataactcatatgccaaatattattgtgaaacataataatcttttatcttaataggaggcataaattaaaatccatatgaatctggccagatgcagtggcttatgcctgtaatcccagcactttgggaggctgaagcaggtggatcacttgaggtcaggagtttgagactagcctggccaatatggtgaaaccctgtctctactaaaaataaaaaattagccaggcgtggtggcatgcaccttatagtcccagctactcaggaggctgaggcaagagaattgcttgaacccacgaggtggaggttgcagtgggttgagatcgcaccgctgcactctagcctgggcaacagaatgagagtccatctcaaaaaataaaaataaaaatataaaaaataaaatccataagaatctattcaaggaggtgaaattatttgggtcacactaaacagttaacgatcctgaacaattctctttatttcaggaagaaatacagagaaacatgtgaaacttgctttgtaagtatgtcttttttttttttttttttgagacagagtcttgctctgttgcccaggctagagtgcagtggcgcaaccttggctcactgcaacttctgcctccctggttcaagcaattctcctgcctcagcctcccgagtagctgagattacaggtgcgtgccaccacacccggctaatttttgtatttttagtaaagatggggttttaccatattggccaggctggtcttgaattcctaacctcatgatctgcctgccttggcctcccaaagtgctaggattacaggcgtgagctaccgcacccagccagcatgtcctttttaaactgcaaagtcagatatttgtttttgttttgtttttcctgttttgagacagagtcgtgctctgtggcccaggctggagcacagtggtgtgatcatagctcaatgcagcttcgaactcctgggctcaagtgatcctctcacctcaacctcctgagtagctgggactataggttcacgcagggctgttttcatttttttgtagagattgggtctcattttgttgccctggcttgtcttgaactcctggcctgaagtaatcctcccattttggcctcccaaactgctgggaatacaggcagtgaaacaccacgcccagttgcagagtcagtttgaatgtaaattccacaatttattgcccaaatgatcatttaactttgactcctataaagagaatgatacctgccttgcaggattaaacaatagaaactgcaaaatgttttgaaaataaattatacaaacaaaatatggaggcaaaagtgatgaaatggctgacagcaagtttataggcacagtggttacagccaaaatcccaaattcaagtgggcagctttgtctcaatatcaatactagatattttatattttgggagagtactgtgtgcatttggggattggaagaattagggagaagatcttaatgaaatagcttaagctatattttcctactattaaaacaggtctttggtcttccagtttatttccttttataccaatagtaaatagttatttggggttaatatgcctggatataataaaaaacaaaagttaatttttttaacagcttatgtttaaagaaaaaaacctgacaaacaagcccttctgatacagttgccctattcacaatcgcagtagctactgggagacttattgttcattttgcgcgattaggaaactaaaaggaaagaccaggtagtaacttaaattagacttttaatttttttttttaagacaaggtcttgttctttgctcggcctgctattaatattttaattataataaaatgctttaggattgagtcactttttaaggcggccaattttcttcattcatagccaataatcaacaagttggacactgactgactgtgactgattttaaaaacctttttgggctgggcgtggtggctcacatctgtaatcccagcactttgggaggtcgaggcaggcggatcacctgaggtcaggagttcgacaccagcctggctaacgtggtaaaaccccgtttctactaaaaatacaaaaaattagccgggcgtggtggtgcatgcctgtaatcccagctacttgggaggctgacacaggagaattgaacgcgggaggcagaggttgcggtgagccaagatcgtgccactacactctagcttaggtaacaagagcgaaactctgtctcaaaaaaaaaacaaaaaaaaactttttgattagtgaattttttttaccagctttaaagaagcttttacttctaatctcctattgctaataaagatgaactatacttgatggaggatcatcagcagcttgaaaaagcgtagcattaacatactttataattaaaaatacatatgaatttcatacgtataattcccatacgtatagtggataacagtagattgtttgaaaaaagataactgacaagtaccaggagaattttagcagcactgttcataatgaactcttgaatgtgcattaacccatagaatgaatagtggtatattcatgtaatgaaatattaatcaggatgaactggattaaactatatgcaacaacatggacaaatctcacaaacattatattgatcaaaagaatacattaaaatattaacccaataaaatagagtttaaaaacaggcaaaactaaaatatattgtttagggatatacatacatgtcaaaactacagggaagtgggcagcatgtgattaggggcaggcataagagaagccttccaggatgctgatattgttctattggtgattacatgactgttggctttcaaactacttgttaaactgtatatatgtgctttatacaattttctggatacactgtatttcacaattttagaaaacttaaacaataaagcatgtaactggatgttcagctctcatacttcagttttaaaacactggagttcattaaaaggagatgggatgctttcagacatctgtggttattccagttgcacatcactgaaattattaggaacatccagttgatgttcttttttcctagaacctgtctctttacagactaactcactcttattccagttaagagttattacctcctggcggggcgcagtggctcacacctgtaatcccagcactttgggaggccaaggcagttggatcacctgaggtcaggaattcaagaccagcctggccaacatggtgaaaccccgtctctacaaaaatacaaaaattagccggggatggtggcaggtgcatgtaataccagctacttgggaggctgaggaagcagaatcgcttgaatccgggaggtggaggttgcagtgagccaagatcacgccactgctttgcagcctgggtgacagaatgagattctatctcaaacaaacaaacaacaaaaaaaagagttatcacctcctgtaagtctttcccaacatctcttcttccctctcctactgctccttcccaccacccatctgatttacgtgcttttcctctgtgtttccttcctactcagaacacacttatacacatatcacattgttctgaaatggtctgctgactttctggcttctactcccagcatctccaaccatccctatgccactaaaccataaattgacctcaaaagcagggacaattgtttttgttctctctttctatgacatatgagtcattcaataaaatttttggtgattaaacaaataagtgaaaatgtattgccatatttccaatggataatacttcttgccaatttttaccacagtgacatgagaaatatgatgaaaagcttttctttcacagtaagtagtaagtattcaataaatggcattactaggagaaagctttccaagaaagagaggatggttgaaaaacattatccacaaattaaatagatgagaaatgaaaagaccactaggagtcaaaagcagtaattggcttactccccttacaggtaacttaagaaacgattctaataaatgaaaagttttatacattagcaagtcaattaaaacactgttcatgagttaataatctatatcaaaactcttaccaaaggcaataataacaaataagcagattcctgatttcaacaggagataaacctattttattttggtcaggcttgtgctcaatgtttactttctcagttgaggtcagtgttattgaactgagatagtatctaattttaactgtgcttgaaaggttatactcttcaaattatatttaaatttcttgattgttttcataagacaatgatacttaatatttaatttaattagtttatattttttgaggcagtcttactctgtcacccaggctagagtgcagtagtgtgaccttggctcattgcagcctctgcctcttgggttcaagagattctcccatcagcatagctaggattacaggtgcatgccaccacacccagctaattttttttttcctttagtagagatggggtttcaccatgttggccaggctggtctcgaactcctggcctcaagtgatttgcccgcctcaaacctcccaaagtgctgggattatagatgtgagccactgcgtctggccagatgcttaatattttaaaaccagtctgtggtagttacccctcagaagaatttttttttttcttttaagacagggtctcactctgtcacccaggttggagtacagtggcacaaacacagctcactccagccttgaactcctgggctcaagcaatcctctcgcctcaatctcccaagtagctgaaactgcaggtatgtgacaccatgccaggctaatttttatattttttgtagagatgaggtctcactatgttgcccaggttggtctagaattcctggcctcaggcaatccttctgtctcccaaagtgctgggattacagacaggagccaccgtgcctgcttgaaagacacatagtttctaaaaaaatgataatactgggttctaaacagaggatcttagggaactctccagtaaaagtttgggagtttgggacacaaaatttaacatttaggattttttccttttttgacttgtcacaaatcccaaaccatgtaaaaacaagcaattatatacacattaaaacatactcacaaagaacataaaaatgttattaagcccttaatttggacacaaaaatgaaatgggctttgctgttttcattaggctgattctcttttccctaaaggaaagagtctaaaagtctctgcctggtaacaaaatctataatctggtccaaatcgaatttactgattttgaatcccattgttctccacctacttcagtcatactggcctactcacagttatctcccaaactcatcaagctcatgatacctttgctcactcaggttccctcatccagaacgtgtttccttttctccattcatgttaatcctcccatttttaaaggcatggcttgttttactgcctttttctattcttccccggattactctatctcatgatggtttctcctctctctaactcccttggctcattctaacatgcaaaaacttgctttttattgttgtttactttaaaaaaaatattttgcattgtgaaatataatgtacacacagaagaataaacaaaacaaagtaaaaagcttaattattccaaagtgaagatctatggcccaggtgcagtggctcacgcttgtaatcccagcactttgggaggccaaggcaggtggatcacttgagatcaggagttcaagactagcctggctaacatgctgaaaacccttccctactaagaatacaaaaattagccaggagggacagagcaagactccgtatcaaaaataaataaataaataaaaaaggccgggagcagtagtttacgcctgtaatcccagcactttgggaggccacacctataatcccagcactttgggaggccaagttgggtgggtcgcctgagaggtcaggagttcaagaccagcctgaccaatatggtgaaaccccatctctactaaaaatacaaaaattagccaggcatggtggcgggtgcctgtaatcccagctactcaggagattgagacaggagaattgcttgaactcgggaggcgcaggttgcagtgagccaagatggtgccactatactccaacctgggtgacagagcaagactctgtcttaaaaacaaaaacaaaaacaaaaacaaaactatgaaacttcctctaggtccagaaacagaaaattgttactatctagaaatcctctccattttccttcctaattactaacacccttttccttcccctatcccttacaaaaagataatcactattctaaaaactatagtaattcctggcttgattttgtttataattgtaccacctaaatatgcaacctcaaatacaatagttttttgagtttcatataaatggaatcatacagtatgtatatttttgtgtttggctttttttattgaacataatgtgagaaatatacatgttgtataacaatgttcattttcattctgtatagaaaacatatttatactcatttaaacaaatggatgactcttttttttttttgatgattcatttttatccattctgctgttgatggaccttcgggttacttaacttttaaaaagtatgtatctttttgtctctccagctagaatgcaagtttcttgaaggcagggaccatatactatactattttatatttaccttagtattaatatttagcataatcctaagcacataatgggtgtcctcaatcacattaaatattgattaaatgaatctattgatagtttgagagataagaaaaaaataagtacagttgggaatcaatttaatatttttagagatagttatgtaactggccttttgtaactactactatttaaataaatcacaaagtttgacctcttctattcatttacacctaaggatttattgtcttttattcttcctgagccaaatgaaagctaaatatttgttaactatcctcaaaaataaaattagagcaattcaaaaggtggttaattgttatgtgctattatttattattttttgaggccttgctctgttgttcaggctggagtgcagtgacacaatcctggttcactgaagcctcgacctccgaggcttaagccatcctcttgactcagcctcctgagtagctaggactacaggcatgtgccaccatgtccagctaatttttttgttttaaattttttgtagagatggtgtctcaccatgttgcccaggctggtcttgaactcctgggcccaagcaatcctcttaccttggcctcccaagtgttaggattacaggaattagccattgcatccagccatctgcttattttgtacagtatctcaccaatatgttaagtactcaccatggccatagctcttaatgagctgctttattttttattctatttcctaaaatttatattaaccattataaacacatgaagacaagcccaaaagcaaaaattccagtgcataaggtcagcaggaaattaatcattcctattcaaagctaaaacaaaccaaatagcttttagttctatatcctctttttatacagtcagtgactgtttcctaggtaatgtgtaaacgtctcaaaagagtatttatatcacctaatcttcagtcctattctgacattctcttggagagctggttttgccttttcgtttatttgccttttataaaactgaaggctcatcaacttctcagcaaacaggaaaatatatttccgggcaagaatttctgatatacctacatcttggccaggtacacataagcatgtctctaatattagttttaacaatacacagactataactggtctgtaaattttgttcaagttggtaatttaacaagaaaaaaagtaaaaaggaaaatagtaaataaatgaaaggcaaaatctaaacaacaatggtatttccaagtcgaagaattatgtagaaaagaagagctgttactacttgtatgcagccaattcacttctagctaaggataattatcaaagccaaatttagtacttttaaaatctaaaataacattctaattttgtatgttttcaaaactgaggccagtaataaatatacctctttcttttcttgcaggcggtgggcgagggggggcggttatttaaggctttcctggaaagaaagcagattgtttaaaatgttaccttcgtaacttcttcatgagggaatagtgtgatgagaaaacacagcaaaaagttacaaatgaaggatgatgatgtatactagtagagaagccagggaaatttctggttatatcacaagactcaggaccttaagactaactgtactataaaataaatgttccattaaataaggagacatttagggaaaaaagagaaaagctaaaattatttttaaaaattttcaaaaattaaaataatcctcaattgtttatgtatgtgtgtgtgtgtgtgtgtgtgtatatatatatatatatatatatatatattttttttttttttttttttttttttttttgaggcagggtctcactctgtcatccaggctggagtgcagtggtgcaatcttggctcattgcaacctccgcctcccaggttcaagtgattctcctgcctcagcctcccgagtacctgggattacaggcacccgccgccacacatggctaattttttatttttagtagagacggggtttcaccatgttggccaggctagtcttgaactcctggcctcaagtgattcactcacctcggctccccaaagtgctgggattacaggcgtgagccaccgcgtaatccaactgttgatatttgccttataaagatgcacagaggaaaataaaaaattatttctgctataagaaacctaccaattgtttatttctgtaaggcaactaatcacacatgttccttgtcttttcatgtaaaagactatttctcctcaaagctgaagaagacttcagtgtgtgggcccttgttcttactttaataaacggtattatttcgcctttaatctaacttgggaaactacaagtacaaaactttatactatatcctcctctcctgtatcttctaaaattttggagtaattttgtaattaaatacacttcacgtaattctacttctggatttttaccctccaagtatcggtcactgtcccaactcctccatcttccagatggttagagcacaattctaagaccaatttattattaaatatattccattaggttacttcctaaaacattccaatatttaatagtctttgagatagcctagcaaacctaactgcattacctctttatcttttagtcccagaagcaatacttcttccataagagtaaggcggatatccttagagtctccagaatcttcattgtctggacttttctcccaattactgtcttcctcactttccatcttcttttcagagttcttgcttatttcagtgcgacgggcccggtgagttaaagtggtcattctcacctgtttctggagggagtggtgaaaaaaaaaatccatatgtatgcttatgtaaataaatcatatattcatacatgcatactaaacatccatacaaataggaaatatttacagatttaaatatagaaagaaaggaaggagtaatgaccagaaaaaaatgggtgggtaatacagtatcttttccaaagtacaatagcttggacttcacagatggcactgacaaaagatcaaatgagtaattctaaagtccagtagaaatgctcatctttcaagcctgttgacttctttttttctttttcttcttcttttcttgagagggagtcttgctctgttgcccaggctgggagtgcagtggtgcgatgttggctcactgcaacctccgcttcccaggttcaagtgattcttgtgcctcagcctcctgagtagttgggattacaggtgtgcgccaccatgtctggctaatttttgtatttttagtagagatggggtttcaccatgttggccaggctggtcttgaactcctgacctcaagtgatctgcctgcctgggcctcccaaagtgctaggattacaggcatgagccaccaggcccggccaaacctgctgattttttctgcataatctataaagaaggagtgaatatccaccattgtcactcctctttcacaaaatggatcccaagttaagtaagatggaacaacaaaaaattgtgagcatccagccccaaaatgcatataataatttgtatctaatttctataaacgttccatggtactacattataaaaaaacacaaaaaatagaaagtaaaaaagaatacgaaaaactaaatagaaatacatgttctatatttccttcccataccctaatgactcatttcatgtactcactttggagatcacaagtctagacgataacattcagaaaatcatgtgtagtaattccacagtcagtaaacttagcagctctagtcctagctagccatatcttgcaaatacacaaggagctgcaaacaaaaattactggcaagagagtgttgaaagattaacaaattttctcaatttaaaaaaaaaagtcaaagaacatgtcttttattctatgtactacggtcaaaagaaactgcactaaatcatttgtgataaagtttatagttagcatactttattttatataaatctagatatcagtttttaagataatatataacaaatattttaaatcagcaattatataaaggagtatctttttcaagatcaaaataatggtatttaagagttgctatgactggactcgtttctactcctctagcaatatttcccattgctcctaataagtagtgttgccagactttttctcaaaaatgtctcatgctttctttctgcttctgctcctctgtacttgctggggtcttcacccttttctcttcctctttacattctacccattctttaaaggccttgtgaaggcctttaagtgacctcctcttttctattacctatgtgtctcatggccactccctcagctgtttcacagagctttatttatactcacttcctttaaagtatttattatagtctttctcttggtatagctgtctctcaactgtaaacttcttaagaacagggatattgtcttcttgggtttatatattctccatagcaactagcactgtctttaacattgttattgctcgataaatttatattgattaaaatgaatactcagaagtgcatgtgaacatttaaaatagaaatacaaatgaagtgagctacaaaagtttttttgtacaagggtatatttcaaatataatttgttatgggaggtgggaagaaaagtgaaggaggaagagaaccatgaaataaattcttaagcgcactaagcctatctggcactgtgaatagggactatttcctaaaccaatccaagaaactttaaaccttcgcggggcagggggggagggggagagggggcggtttctttgagaaattagtttcatctgcacatttactagttaaaaatcctacttgaaagaaaacaaatggcccaaatgaatacaaacctttccctcccataaaataataattttaaaaaatagaggttttttttggtggggggaagggacgttaggaaatgtaattttctcgttgcttacctgatgttactcctgggttatggctggacgcaggctgtagcttgtgctgtattttagaaggacacctgttctccccaccccacccccgtcctagtaggtgaaaaacttagccacgcagagagcacaaacttcctgatccttcgatgcagagaaggaataacacatcagcttcctcaggatcactaggcaacctaccttggtgtttcttcattgcgccaatcagaaatcaccaaggttgagtcccgccaatcggagctcacagggggaggctctcccccagctattctgttgcgatccagacaaacaccaccaaaaggaggcaggtttgcgttcaacctgacagctggtcaatccaatgaaggaaccttggtggaagagaggaaagagggctgcgctccccacccccattaaaccagccaatcaaagcgctgagtgagctaacatgggctgccaatctcgaaaggtttctgtgggttaatttcagcgtagcaggtgtgttgctgtagtagcgtatactgggacaattaagtgagatgtgttgggatccaagcaatacagctaaaaataaataaatatttttacattggttgtttctgacagtcagtttatccttgacttgactgttccagaaaaacatgatctgggtcagtttgtgtacgtttatatggtttaccttaaacaggatgaatacatttctaccatcgcatatgtaccagcattccctatagcgcttattactgacaaacccatggatgtgtatgtttttggaatatggctgctgaaactacaagcggcaaacagaccaagttttaagtcttcctttttctaaagcaaagaaagcaggcaaggctggaactagctcccaggtttctcattaaaagcacagcatttttcatactaccactcaaaaattctagaaagtgtgctcaactcttcttgcaaagtaatagctaccgaaatcatctaaaaattagtattccctatccccccatcctcctaccagcctttcaaatgaatgaagccatatttcctgctacttaaataaaaattagaagcgataaaagggcctacgtactgaacaatattttatttatgctgcaaaaaatgccatactttaaaaatcagtctttttgtcctgtaaaaaaaagcatagtaaaggtaaagcaccaattcttaaattgtacattatatattaaaatgttaatacattatgtcaaaatattgaagaacattgttttaataacagcacaatgacaaaagagccagttaaatggtataattttaacataagtaaaaagtgaatccataccaaattttaataccaaagtaaacattactgtttagaaaaatggcattagagggccttaacagttagtatatatttaaaggaaatattaagtaggtaatgaacaaaatcaattttgaaattttacttattaccgaatcaattatgacatttgtacttttgcttttattcaaaagttctattggatttatctcaagattaaggaccacaatatgacagtcagccaaaaacttagttttagtgtacaaactgctttaaactacatatacatcttcagagttagggaaatataatatagggtccttcagtttaaatggtgagaagaactctgcaagcctgcagaacaaaaataatttttatatatgttcctttggttcactaaactttctcctttttggcactgactcttgactagaagaatcaaagtgatggaggacctgtcaaaagaaaacaactactaagaatagatactttcctgtttaaatgtctttaattgtagattttttcatgtatctgagatttctcttctttttaaaaaaatttatgcctagcatacctagcataactatatctgggtttcttaaaagtagagtaaaatttattattaacatcttccaatggctgctgaaagtatgtacttgcaaaatgtataatcttcagtagggctgctctagaagtgagaagatagatttaacattatgtcctcaaaatagccaaatatttcagagcaataagaagggaaaaaagattttaaaatgaactacaaatagaaaaacattctaccttggaatcatgtacgatttaaatcatgtcttgcttttgtactcttgagacgttaacatttgagttttaaaaatagtcttaggttttcagttgtttaattctaacctactaataatactaaaatatctagttggaaaaatatgaataattatctcagaaatggcaaatacattatctgatttggtaaaataaggttctaaatatgaaacaactatagggtttaagtcaggaaaatatttttttctccagaggtactaggaggagaccctatatttttagggaacacatgtatttagtaaattatcctccttctacttcagttttgatctctagaaagctcagatcaaatttgtggcccaatttcagttctatataaacaaaatggccttagtattcttgtactgtcactttctcattctatattctcttatatttttcctggcactgattttttttttttttaaagacggagtcttggtctgtcgccaggctgtagtacagtggcgcgatcttggctcactgcaacctccacctcccaggttcaagcgattctcctgcctcaccctcccgagtagctgggactacaggcgtgcgccaccacgcccagctatttttttttttttttgtatttttggtagagacagggtttcaccatgttggccaggagggtctcgatctcttgacctcgtgatccacctgcctcagtctcccaaagtgctgggattacaggcatgagccactgcacccagctgatttttaatttatatattataaattcctccaattactttaaatcattcatggaatgagacaggagatgtttacatggaaaaaactaataaaccaacatagggcatcttatttcaaaatcacctcgatttttagaacaaaatatatttaaacaaaatttgaatatcagaactctcaggtacatcgaaagatatcaaattcatcattttaaatttaatctgtagtaatgatattctgatccttcccattgtattcaaactatacattatcataagacttactattctcccagattcatgttgacttctcttccgattttctttggaagattttactggttgatttccatttgcctccacaaagatagaataattactaattggttatttctcaaagaacagccaacacttgatttttcaatcttatgcaacgatatgcaatatttatttatttatttactttttagggacagggtctccctctgtcacccaggctggaatgcagtggcaccatcatggctcactgcagcctgaaacttctggcctcaagggatcctcctgcctcagcctgccaaagtgctgggattacaggaatgagctacagtgcccagctggatatacaatttttttaaaaaacagctttattgagatataatttagatactatatgattcacccatttataagtgtacaattcaatgattttcagtaccttcacagagttgtacaaccatcactacaatcaattttacatcactttcatcaccccacaaacaaaccccatataccttagctatcactctcttattctgccatcctcccaccagccttaagactgtctcaataactttcccagttctgactttcaaatgaaaggaataatacaatatgtggacttttgtgagtaacttcctttaattagcatgttttcaaggttcatctaagttgtagcatgtattggcacttcattttttttatggctgatattcaattgtatgaatataccacattttttaatccattcatctgttgatgtatatttaggtttttcccatctttcggctattgtgaataatgctgtatatatagttattaaaatgaatattggaaaatgactaatgattaggtgtcatacaactattctctaaaaggatatacttcttttctgatgcttgaaatgagctttccaatgataacttccttagtatatataataatgaatattttcatttcttgcccttttctaaccacaattcagtaataattctcaaaatcaggagtacacttgctcagagttcatatccaaaaacatgtgcaatttcagaaataaatttatgtccctaaatcatcttaatgttacattacaaggagatcttgcttaataatttttaaaatgctggtctctatccctatatcctagtaaaggttattcatcctacatataaactggctaggatgaacattttgcttctagaagtagtaaatcttgacattcctttatctcttgctttcatgagatactcatttgaatgctgccttctgccagttctaacttcccattgagaataggggtgggggaagacacttaaaaatggcactataatgagtagtgttccaataaatgtttaataaccagctctaggagagaaacaaaccttgaggcatttgctgatttctgtgctgtgaatactaccaacatgtccaatttaagctaccaacatgatatctctgagtggggagttgggaataaatgttctagcacaccactaacagagtgagctatttatttcctaaactttagatattttatatattttacagaatgctttttcttcaccccaatgaacctttgagagtaacttaaaggtctaaaatcaaatatgaattttgatttagtataattcataccaaaagctaaaataaagcagtgatttttttcccttaagaatatgagattcattttatacaagatatatacaaaagattattttgtaatgtcttattaacaagatactcaatttataagactgagcatggtgctcacttcagcagcacatatgctaaaattagaacgatatagagaagattagcatgtcccttgcacaaggatgacatgcaaattcatgaagcattccatatttttcagagtgaacagagaacctacagaatgggagaaaatttctgcaatctatccatctgacaaaggtctaatatccagaatctataagaaacttaaacaaatttacaagaaaaaataaacaaccccattaaaaagtgggtaaaggacatgaacagacacttctcaaaagaagacattcatgtggccaacaaacatatgaaaaacactcaacatcactgatcattagagaaatgcaaatcaaaaccacaatgagataccatctcatgccagtcagaatggtgattattaaaagttaagaaacaacagatgctgacgaggctatggagaaataggaacacttttacactgttggttggaatgtaaattagttcaaccattgtggaagacagtgtggtgattcttcaaagatctagaaccagaaataccatttgtcccagtaatcccattactaggtatatacccagaggaatataaatcattctattacaaagatacatgcacctgtatgttcactgcaccactattcacaatagcaaagacagaatcaacccacatgcccatcagtgatagactggataaagaaaataagcagccataaaaagaaatgaaatcatgtcctttgcagggacatggatggagctggaagccattatcctcagcaaactaacacaggaacagaaaaccaaacaccacatgttctcacttataagtggtagataaacaatgagaacacatggacacaaagaggggaacaatacacactggggcctgtcagggggttggagggagggagagcattaggataaatagctaatgcatgtggggcttaatacctaggtaatagattgataggtgcagcaaatcactatggcacacgtttacctatgtaacaaacctgcacgtcctgcacatgtatcttggaacttaaattaaatgaaatttaaaaagaaaaaaagatcaagcatgggaacattctggcattctaggaaatttctctgggagtctggatgatagtatcacttcttcccaaaacctttcccggatccctctctttaatataccttcagtaaaattaaccattcctttctttgtgcctatgtagcctattcagacttctataatggctctgtatcattgcttgtttatttccagttactaaacttcagctaagaccatgaagtatgtgttattcaggttatatcctaagcacctagtaaagtacctgacacataataggtacttagtaaatactggtttaataaacgaaatattaaaataaactcacatatgggggagaattacaaggttacaatggaaaacaaacctaaagagatatttaccattttattctgaaagacttttccacttcttgttttgctttcagacatatcaagttcagatgttttattgactaactgctcaacctaaaaaagaaaataattacaaaaaatataacttagtataataaaaccttttcataacacaataaatggggtccaaaaatttaaccacataaaatttagggtcttgtcaagttaaaaccaataattttgagttggttcatactgttcaaaaagcacaaaagtaaagatagtgaaactgacactttacataattggccaaccactgaactgagaaagtaccaaatgatcaccaggcaccacccttccagaagacaagaaatttagtctacttatttgagaaatgggctgggcagaggaagacagacaatcaatcatcaatcatattttttccaagttcatattacctaaatctcttatttcaggattttactgtatttgaaaagcagaataaaacatgtatgctccaaggcaacacaaatgtattatatattccacttataaatacaaagcagggtggaataaataactgcataagattctatctagctctgaaattctcagattctaccaatagtatttaggtttattactaaacaaatccaccagtaatatactcaaaattcatcaacatataatttccagatttagttaataacaagcattctaaatattgaattttattctaaaagacctggaataagaaaatctgaaaaataaaaaattagcgcataagcaactgtcctgtgaacaaaacaaaagtgagatgaaactatcaagtttatacctgagaatgagaaatagaaagatctggactttctttagacctcataatttcatcttcctcacaaactaaacttggttctgtaaaaaaaaaaaaaaaaagttacccgggtataaaattgagttggaagtgagttaatgtacattttcattaacttcttaccttcaagttcagaagatgcagggtttttttcctgttcttccattttagtttcaatgtccaaatcatcctacataattatgtgaagaaaaaaattgacacatttcaaaaaggaactaaaacaactgagcagaaagcatttatgaacaaatttgtttcatgtgaaggctaaatacaatataaaactactggccgggcatggtggctcatgcttgtattactagcactttggaaggccatggagggaggattgcttgagactagtagttccagattagcctgggcaatatgatgagacctcgtctctatgaaaaaattttaaaaattagccaggtgtggtggcatgtttctgtcacctgaggctgaggtgagaggatcgcttgagcccagaagtttgaggctgcagtagccgtgatcatcccactgcgctccagcctgggagacaggacgagaccctgactcaaacacaaacaaacaaaaaaacccaagccaggcgcaatggcttacgcctgtgttcccagcactttgggaggctgaggtgggcagatcacttggggtcaggagttggagaccagcctggctaacatggtgaaatctcgtctctactaaaaatacaaaaattagcccggcgtggtggcacatgcttgtaatcccagctactcaggaggctgaggcaggagaataccttgaacccaggaggctagaggttgcagtgaaccaagatctgccactgcacttcagcctcggcaaaagagcaagactctgtctcaaaaaacaaaacaaaacaaaacaaaacaaacaaaccagaaaaccccaaaaacctacaactacctcatggttgctagaaataaaagtgttcctagaatttctatcaaaaggcaatttattaatccaaataaagtataaaatactatttttctttattttgcagggttgctttaaggacaaatgataaaaatatacaactttcggccaggcgtggtggctcatgcctgtaatcccagcactttgggaggcacaggtgggcagatcacctgaggtcaagagtccgagactagcctgaccaacatggagaaaccctgtctctactaaaaatacaaaattagccaggcatggtggcacatgcctgtaatcccagctacttgggaagctgaggcaggagaatcacttgaacctgggaggaggaggttgctgtgagctgagatcgtgccattgcactccagcctgggcaacaagagtgaaactctgtctcaaaaaaaaaaaaaagtaataaacaaaaactcttcagagagttattgaaggataagctcagtcatgttatggtagaaattgcaacaggtttaatgtctacattacaattattgttccctttgtgatacatgtgaaagagatttaaatattttaaagaatgctacaaacacctcagccatatttgttataaagcaagactgggatttaggtcttagaaaaaagtttttttctttaactgaattggttgaaaattgattgaattttctatgtgtaaagatgtggttagacagcctaatcagaatagtgaatctctgtacataagtactgtagtcataatttagaataaattgagacacagaatacaagagaggtgagattaaaggacataatgttaatgcttgaaagattaaagcaataatgacttccatatttgctggaagtgaggcaacaaaaaaactcttttatacttctattcatccattcactcgactaatacttaggacgcactaactagaaatccaagtgctaggcacaggatgattaaaaagttgaatgagacacttttcctgacttccaggaacttccaggctgcttcagaacagtgactttccaggccctagagaaattcaagcacaggctacctgaacacttagtagggatgttgtagaaaagattccatcattagccgggagttagactagtgcaatgcttttcaaattatgccctagagtcctaggggtttcctcagagtccactaagaaggtaagtgacatagggagtggcagagcctccaggaacattccctacttcaaccagaatagttgtgcttttaagttctagtacaatgttgtttgggctaagtaaaaagttttaaaaccataggcctagactttaaggtccctttcaaccttgagtttatgattataatacagaatttacacaaatgttaatgggagctatgaaaaatcttcagaattgagtcaaacatttgttattattgttctttataactcttgaaatacacttacacttgtataatgctcctgttcatcttctacatctttgtccctcaggattttttgaaatggtgtttttatttgttttggtgatagtatagttgagtcaatattttccattcgttctctctcagtggtcacttttactttgaagatgtgaaaaggtgttgagacttctcccacatttaaatacataggttccccttcaaatataactccttcacaatcaccatccttaaaaccgggaggctggtaatctgggggtgtaactgcaaaaaagtaagtgtaaactgtgctgttcatgaaattaaagaaaatataattattattataaaaacacacgcagattgcaggtatttcaaatagtatataagggcataaggtaaaacatacgaattactctcctgctatgtccaagtccccattttattccctaaaggtaagctttgttttcttcacttgactgtctgtgaccttgagtaaattattcatcatccctgatttgattttctcatctgtcaaatggtgaaaataatagtacctacttcatagggtcattgtgggaataaaataaagtgtcgtaaaatgttgagaagagaactggcacatagtaaatactcaataaatgttagttgttatttttgttgctttatgttcttctagaagacatgcatataataaaagatatttcatatttacataggttttaggaaatacatataaaatttcttaaaaaacacaaatgagctcataccattccatacctagctggttttaacttaataatatatcttggataacgtaatttatcagcaccttctttttaacagcttgtgtagtattctattacgcagatggaccataatttatttactcagtccccaatgaaggacactgaagttgtttccagtttgttcctattttagccaatgctataatcaaaatccttatataactttgcgtatttgcacaattatatcttcaatatatttttctcactatagaatttctggattaaagatagtgtgcatttaaaattttgatactgccaaattgtcctctaaaaatgttgcacctgtttacagtccctcgcgtgtacaaaagtgcctgctcagccgggtgctgtggctcacgcctgttattccagtactttgggaggccaaagcgggtgaatcacttgagatcaggagttcaagactagcctggccaacacggtgaaaccccatctgtactaaaaatacaaaaattagccaggcatggtggcgagtgcctgtagtcccagttactcaggaggctgagacaggagaattgcttgaacccaggaggtggaggctgcagtgagctgagattatgccactgcactccagcctgggagacagagcaagactctgtctcaaacaaaaaaaagttcctgtttccccacatccttatcaataatggattaacacgttttaccaatctgataagtgaaaactgttaactcattgttaaatttgagtgaggttatacttcacatggatatgttcctatcactagagaagcatctattttaaagcttaattttgtaaatctttctttcttgaatagtgatattaagtgtaaattttataatttcaaaaaatttaggtgctaaaaatatttggaatggaaaccaattgtttcaataatgataaaacatatgtaccaactgaaacaggatgtattgcaaatagtaccttcatcatagtaaaaaagtttcatggtcaaacaaacatcattaggtaaaggccccagattttgcattaggatataaatcttgcgaatgaggagaatgcttgctttcttggtgtcagtagacaacatgctagattcgttgctttggtttttactagaagagaatcacatattaatttattttataaaacctgtggcttctaatatcataactttacattttaactatttgagattcttatttctattatagcattaagctgttaacttgaaagttaccatgtgttttaatgtcactattataaaattttaatattaatatctgctagaaataataacttaattttacttaagtgcattttatatgaagtgtttaaagaaagcacattatgttttaaaattatatttctatatttctaatcacctaagttctctttccacaattaaaattgcttattattagccacagaatcctggcttgaagctactgcaagccaccactccattttgcatagccacatcttgatggttaattggggatgtccccgcagtttcagaatgaatcctgaggtttagctatatagcattaatatgaataagtggtaatctgtaatacaaacagaaaactatagaacaataccttatgaagtccatgagtggtccattattggtgtatttgaatttgaattggtaacattctgaaattgtcttaaatagaaaatatcgcagttatgcttctgatattcagtactagctgctaaatagctatattctgttttgtatgactcaacatttagtcaatacttttttctgccatattaatccctattgatccattgaaacttttgattcctcatagtcagttttcatggtttgggtttggggcttcagtcttggagagacatttatttcccaactcattgtaatgtatgttattgtagggaaaagagagatcagactgttactgtgtctatgtagaaagggaagacataagagactccattttgaaaaagacttgtactttaaataattgctttgctgagatgttgttaatttgtagctttgccccagccactttgacccaaccactttgatccaatctggagctcacagaaacatatgttgtatgaaatcaaggtttaagggatctagggctgtgcaggacgtgccttgttaacaaaatgtttacaagcagtatacttagtaaaagtcatcgccattctctagtctcaataaaccaggggcacaatgcattgcggaaagccgcagggacctctgcccttgaaagcggggtattgtccaaggtttctccccatgtgatagtctgaaatatggccttgtgggatgagaaagacctgaccgtcccccagcccgacacccataaaaggtctgtgctgaggtggattagtaaaagaggaaagcctcttgcagttgagatagaggaaggccactgtctcctgcctgcccctgggaactgaatgtctcggtataaaacccgattgtacatttgttcaattctgagataggacaaaaaccgccctatggtgggaggcgagacatgtttgcagcaatgctgccttgttattctttactccactgagatgtttgggtggtgagaaacaaatctggcttacgtgtacgtccagtcatagtaccttcccttgaacttaattatgacatagattctattgctcacatgtttgttgctgaccttctccttattatcaccctgccctcctactacattcctttttactaaaataatgaagataataatcaataaaaactgagggaactcagagaccggcgccggtgcaggtccttggtatgctgagcgccggtcccctgggcctactattgtttctctatactttgtctctgtgtcttatttcttttctcagtctctcgtcccacccgactagaaatacccacaggtgtggaggggcaggccaccccttcagttatttataccacatggaaggaactccttagcaggcagataagggaggcaacatacctcagcagagtggctaacacagggcataaatctttgctatactgtaaccacaggcaagccacttaagccttagtttaagtattagtttccccagctaaaaaagagattaaagacagtacatatctcattgatagttgtgaataaatattcacaaatgggataatttatacagggtactttataaagtacctgacatatagtaaacattcaataaatattattattgtatcaacaaggttgctaatttactgatagaaaaaatgcacaactatataacatatgaaaataaatgaacattttctgaacaatcaattagttttctgaacacaatctattaattcacagcctttacccaaatgatctgctttgtcagcatggatacatattaagcattaatcgcaggtgtgagtatcaaagaaaagacacattctcagccctcctgaagcctgaatacttctattgctttctttatatttcattgcttacatagtgatgtttttaaacgtctatttttaacaccagtttaaatctacctctccttgactgaatgaaacgttatattgtaacagctatagcgtaatgggtaaacacccaaattgtgaactggccttcctaggttcaaaaacctggttctgccacttcagccactatgaccttaggcaagaaaccccttgtacttagatttcctcatctgtaaagcggagatgctaatagtggttacctcatgaaggttgggatgaataaatgagataatgcacataaagccccaaagaacagagcctaatataaagtaagcactcagtagatctttcccccttgtttcttatcttctggttttccctttcacgttctcccttctctcctttaatggtaagataaataggtagctatgaatggattgggatgaatattcgaagtttaaggatgactttcttactttcctaaaactcaagccctttcataattctaaaatgtagtataaaaaatactataaagaattagacgtcaggagatttaagttaagtttctaacagtttgtaagctttgtggcctaagatcagtcacataatctctgtcatgctaatctgtttaaaggtaacaatccaagccctgccttacctcagaagagttttatgaagctcaaatgtgaaaatatatatgaaagtatattgattaaagcataattaaaagcataagatattcttatattatgtttcgtgttatttttagatattagaggcattatgtttctttagtaactcaagcacacttacctgaggatcttctgggtttgtgtatacctatttaaaaacaatttacaattgagttatctaaggctaagtattcaagaactaaattagatgtttagactaaacttcatgtgaactcagcaaaacaaacaaataaaaatgaccacccaaaatattactttttcattccattgaatagatcagttatttgaataatgtgacataatcaattgatagttttagtgtcatttaattaagcaaggccaaatttggcagtattaaaaaaagaacacacaatttaaaaatacttacagctagaacaaccatccttagctgaaatacaacaaagaacaaaaatcttacttgtagtctataaaataatttttcattacgaatcataagaattctttgtcctatttcaacatgtattcctaataacaaataatcattgcagatcttgactgcataagatcaatgcctataatgcagtaccttagatatgcttccctatcccctgaaatatctattgctactaaaattactgatgattgaaattcatgtcagcactttatttcattgacttaagcaaaaaggacattactgccagttacaaggaaaaaatatatatattgtgaaataacacaatatatgtgttatactgaaaacaatgagaactgattttgaaaaaagaaaaagcagagttcagggccctatgaattcaacagagggaggaagttttggagaccataggaaaagaaaatcatagaaaataatttaatcaagtgatctgccaaaaatctaagagtcatccttgattctgatcttttccttgtattacacaaccagtccatcaacaaatccaatcacttctactgccaaatctatcctgaatctcctctctctgctatcctggtctaagcaaccattatttctcaccagtactacagtaatggcctaggtgctattctccttactcccaatcttaatctccttctacagcatattctctaagttgtaggcaaagtgatttaaaacaattattttttaagacagagtatcactctgtcactcaggctggagtacagtggcatgatctcagcttactgcaatctccacctcccaggttcaagcgattctcctgcctcagcctcctgagtaactgggattacaggcgcgccaacacgcctagctcatttttgtatttttagtagagacaaggtttcaccatgttggccaggctggtctcaaactcctaaccttaggtgatccacgtgtcttggcctcccaaggtgctaggattacaggcatgagccaccacgcctggcctaaaacaatttttaaatgtaaatcaaatattacatttctatgtataagctttgaatggcttttctttgcacctaaaataaaagccactgagtgctctggccctgcttatctgcccaggctcatctcatgttattctcccccactggacaattgccctcagtcatattggccttctttttgttcctggaactctctaaacttccaattctttgcatttgctgctctgccaggagtattctctcctaaaatcaatgcctggctggtttcttctcattcaggtctcttcaatgtcacttcctcagagaagctcctatgaccatcccatctaaagttacttcacctttccatttaccacatacttttgctaaaaattttaatggcaatttaacattattgaaaagtatatgatttgttttattaactacttgttttcctactttacaagggaccttttttgttttgttgatcactgttagcttacccagttcctacctagaagagatgcctaacacataacgggcgctcaatatttactacgccttaatggggaagattaggaaccatgaataaaaattaatcttcttgaggctgaggcaggagaatggcgtgaacctgggaggcggagcttgcagtaagccgagatggtgccactgcattccagcctgagcgacagagcaagactccatctcaaaaaaaaaaaaatttcatcttcttcacaattagcctagtgctggacttcattatgcaagttggtactaaattatactaagtatgcaaaaaggattacaatacatcttaaaaccttcttaattttgctaattcagaatttgtgacaatttaacctagattatgtggaaatttatttttgaaccctaataaggaaataatttattaaattattagtataaacaagcttgtagaaggcatgtgaaactaatgaataaactatttgaaaagactctttaattcattaacttttttgtaagttaacacgtgttattaatacaaataagtgttaaaaaaactagcttggaaaaatttgtttagtgttaattccattatctttaaatgagttgatgattagtctttaaaatattcaaatgtttaggcttttcagtaattcagactgacctacactcaagttagttcaaatgaatgttttactacatcataactccagttatatttgtagatcataaactgtagaaaaaaaaggataaagagattgcaagacttacatattttttctgtaaagcatcataacatcctagcatcctaaaaaaaaaatcaaggattcatttttagactgaatgcatttccagaaaatagttattttcataaatttccatattatctcattactaaataatacaaaaatgtcttattaaagctcccttcttattaactagcttaaaacaagacaaaacataaaaaacaatgtggcagaaatgtaaaatgatgatagagatggaagggaaaatacaaaatatctgacagctatttgtggggaacaataataaaataaataaagcctgcttgcatggggcacaaaataaagaaacatttatttttaaaatttatttttccaaatacccagacttcaaggagaggaaaacttcggtggaaaatttaatgacctacaaaaatgctatctagcattaaagggtgattcactaaaatttggttaaacaccaaaggtatccaaggtacaaaaaaaagtaaaatgagaaaaaaataattttctctctttaggtattcttttacttgccatttcactaactgtgtagatcctgggcaatttttatcttctctcagtattttgacacaaagatctaaacacaaaaatgatgaaatatagagttacttaagaaaagtaaacaactagaaattttaaatgaagtttattttcttctgctgtgtattacaggtaaattattattataattattattattttgagacagggtctcactctatcacccaggatggagtgcggtgacatgatctcggctcactggaacttctgccttccgagttcaagccattctcccacctcagcctccccagtagctgggacttcaggtgcgccaccatgaccggctaatttttgtattttttggtagagacagggtttcctcatgttgggcagactagtctcgaactcctgacctcaggtgacccgcctgcctcaacctcccaaagtgctgggattacaggcgtgagccaccttgcccagcacaggtaaattattaatagcaataattaatattattaatgtaattaaaggaagaaaggttatatgaaagtagtattttaatatttattataagatgccatcataataattaggatgcaagctgatgggtacaaaaatatttcataaaaaacttatagaatccatgaaattagatatgttgctttcatgccattgttatacaagaatcttagaatcttatcccagtaaaatacttgtaaaggccaagaacttaacgggctatcaaaaacaaagaggcctgcaaagaagcaacatgtaacacagtggaaaagactgagagtctctcatatcctcaggtaccttaattgaaaaacaggtatttgtaagactgctacatgaattaacaagatatcgtatataacatagtgcttaacatattgcccagcacataactggtgtacaatattatgcatgtataatgtactgagaaataagttattattgtagtataaactggctgtattattattattattttaatttaaaaaatagagatggagtctccttatgttgaccaggctggtcttgaattcctggcctcaagtgatcctcctgcctcagcctcccaaagtgctgggattacagacgtgagcttccacgcctggccctggctgtattatttttacttccttaaaatagcacaagaacatacactactactgtatgttttctattgatttctttcatcattataagcataatttcaggtaaaattatacttgagaaactgaggaaaaattttatgattaagtgcttctaaaggtattgaatatatatatatatgtatatattttaaaaccatttagttatccaaacaaaaacaaaaacttgtacatcagtgcggcattattcataatagccaaaaagagaacccaaatgttcatcaactaataaagggataaataaaatgtggtacagccatgcaatagaacattattcagcaacaaaaagggatgaagcactgatccatgctacaatacggaggaaccttgaaaacatgctaagtgaaagccagtcacaaaggaccactttttttttttttttttttttttttttttttgagactgagtcttgctctgttgccaggctggagtgcagtggcacaatctcggctcactgcaacctccgcctcccgggttcaagcgattctcctgctcagcctcccaagtagctgggactacaggcatgcaccaccatgcccggctaatttttgtatttttagtagagacggggtttcaccatgttggccaggatggtctccatctcttgactttgtgatccgcccgcctcggcctcccaaagtgctgggattacaggcgtgagccactgcacccggccaggaccacattttatattatttcatttatatgaaatgtccagagtaagtaaatctgtacagacagaaagtagattggtgattgcctaggactgggaaggttgaggggaagtgcacagtgccttaaggggtatggagtttcttcttgggatgaagaaatgttctaaaattgactgtggtgatggttgtacaaatctgttaatttattaaaaatcattgaaatgggccgggcgcggtggctcacgcctgtaatcacaccactttgggaggccgaggcgggcagatcacaaggtgaggaaatcgagaccatcctggctaacacggtgaaaccccgtctctactaaaaatacaaaaaattagccgggcgtggtggcgggcgcctgtagtcccagctactcgtgaggctgaagcaggagaatggcgtgaacccaggaggtggagcttgcagtgagcggagatggcaccactgcactccagcccgggcgagaccccgtctcaaaaaaaaaaaaaaaaaaaatcattgaaatgtacactttaaacaagtgaactgtcaggtacgtgaattgtattaataaagcttctattaaaataaaatttctaagtcaaaaattatagttttggagcaagcaaaaataaaaataccattttaaaagaaagctttaaaataaatattgtattaccatctagatatcttgttccataagcgcattctgggaatattcccctcaaatacgtgatacaggatactgaaactgctagaagcctcttcactaacaccaaagactggtgttcagttgatatcttattgggaaataccagtgcactctaaaattcaagggaaagtagaacactttatttaaatttattaaaaataaagtttctcttgacttaacatatatccaattttgtataatcatagtactcaccccaagaattcctccctatattggttagtaatcccccaaaagtcagagcggcatgtaaaatgtgagggtatttctagggtaatagcctaaaggacatatgcaaaaagtatctaaaaatcttttaattttttttttttatttttaaaaaaattgagacaggatctcactgtattgcccaggctggagtgcagtggcacaatcacagctgcctacaacctccattggatgcaagttgatgggcacaaagtatttcattaaaaaagtataggccgggtgcagtggctcacgcctgtaatcccagcactttgggaggctgaggcgggtggatcacaaggtcaggagttcaagaccagcctggccaaatggtgaaaccctgtctctactaaaaatacaaaaattagctgggcgtggtggcaggcacctgtaaacccagctactcttgtaatcccagcacttgggaggctgaggcagggaattgcttgagcccaggaggcagaggttgctgtgagccaagatcgcaccactgcactccagcctgagtgacaaagcgagactccatctcaaaaaaaaagtatataatcattatataattcttcagattatattcaaatatatcaaatgcttgtattttgaggatgaataaaacaaatgttaatagtggctggtattttaaaaacacctttttgggacacccatataaagtgtttttcagtttaatggtttttagtttattcacagaggtgtgtgtgcaacaatcaccaccaatttcataacattttcttcatcccaaaaaggaaacccataccaattagcaatcactccctgtcccttatcccatcccacgtcctacccattagcctatctgtccctataaatttgcctattctagacatttcatatatcctcgcacaacctctaaagtagctgagactacaggcgttgcaccaccatgcctggctaattttttttttttttttttttgtagagatgagatctcactatgttacccaggctgacctcaaactcttgcgctcaagcaatcctctcacctcagcctcagctcaaaaagtacctaaaaatcttaagaatccccttgcagattaactgtctgtaaatgcataacacatggatagattacattgatttttctctttggtcactgagtaggtataacagaggttaagtgtaatgcaaaatcctatacaaatatagcaaatgcatatttgtgtctcggttacaaacattcattttctttctttttgagacggagtctcactgttacccaggctggagtgcagtggtgtgatctcgactcactgcaacctcccccttctgagttcaagcgattctcctgcctcagccaccttcatagctgagactacaggcgtgagccaccgtgcccggcctcattttcttatttatttaattttattctgcttatatattgaacattcatgttctagaggtggactgctatgaacaataatttcatcaaagcaacaaagcagtattcattaatacctaatgtaaattaaatgtgaatgagcaatttaatgcaatgcagcaaacatccaatagaattctcaattaatgccgggcgcggtggctcacgcctgtaatcccagcactttgggaggccgaggcgggcggatcacgaggtcaggagatcgagaccatcccggctaaaacggtgaaaccccgtctctactaaaaatacaaaaaattagccgggcgtagtggcgggcgcctgtagtcccagctacttgggaggctgaggcaggagaatggcgtgaacccgggaggcggagcttgcagtgagccgagatcccgccactgcactccagcctgggcgacagagcgagactctgtctcaaaaaaaaaaaaaaaaaaaaaaaaaaaaaaaaaaaaaaagaattctcaattaattcaaaatacttcagcaaatatcttcatttcttaaaacatgcagtttcctggtatcataaaaccctcaaatagttgagccctaacttccaacagagtatttgagacttcaagaaacaataaaagcagctattattaagatataccaaaatacaagaaatcataccatgggagtcctctgcaactgggcagtggccatcttcttctgataaagtattttctttaattcaaccttgtgacacaaatacaagctttaacttagagctcatttttttcctctaacatttcagtttaccacatataaaattcaaaacaattttatgtgaataaatttgaatttctttaattaaaatagagtcttcaaaaacgtagaggtcgatattgcagtagaaccattttgagtagggtcctgatttgaagccatttgactagcaagtctcaaacaaatgggttattaagaaactgtttaagagaactttttaaaaaggcacaatcttcctatttttattccctatacaaattcaaacaatgacaacattgtacaggtaggtattcagtaatgaaaaattgcctggcaaaccctctaaactttttcagttttatttgtttttatttttcatttttttgagacggagtttcgctctgtcgccaggctggagtgcagtggcgcgatctcagctcactgcaagctccgcctcccgggttcaagcgattctcctgcctcagcctcccgagtagctgggaccacaggtgcccaccatatatatatatacaattttttttttcgagacggtgtctctctctgttgcccaggctggagtgtaatggcgcgatctcggctcaccgcaacctccccctctgggttcaagtgattctcctgcctgagcctcctgagtagctgggactccaggcgtgccaccacgcccagctaatttttgtatttctagtagacacggggtttcaccatgttggccaggaaactcctgacctcgtgatccgcccgcctcggcccccaaggtgttgggattataggcgtgaagcaccgtgcccggccgctaatttttttttctatttttagtggagacggggtttcgccatgttggtcaggctggtctcaaatgatcctccggcctcagccgcccaacttgctgggattacaggaagttgtgtgtccggaaccactgtgtccggccccagtttcacttttcttaatcagacaattcagctggaagagtttactaaagaggcaaacttcatagaagaacctatttacgttaaacgtttaaatttatcctgacaaatcctgaattcgccgtccgtactcaccccatctcaagaacctctgttgacaagtaagtgggtatacatttttaccgcaaatgttttaccactaagaccttaagaaacttaaaagtagggggaagctgacagacaaagagattaaaaagtaaaatatacgcacacacacacagatatatacacactaatatatattacattacgtctgaggggcgggcgccggagaccagaagagctgcacgaggctgcacgcgctgtgcccgacgcgcatgcgctttccttcaacggtcacccgctggggcgcgacagtggctttttgacccctggtcgaggtcacctttcccgccaagcgcagcgcaaggcgcactgggagcctcagacacgggaagcctcagcgccacgtctcaggcagtggaaaagccagacagaagggggaaggttaagtaactgcatgtgcagttactgaatttctgattgtttttctgacttttgattttctttcttttttttttttttttttttttgagacggagttttgctcttgtcgtccaggctgaagtgcagtggcatgatcttggctcactgcaacctctgcctccagggttcaagcaattctcctgcctcagcctcccaagtagctgggattacaggcgtccgccaccatgcccagctaatttttgtatttttagtagagacggggttttgccatgttggccaagctggtctcaaactcccgacctcaggtgacctgcctccctcggcctcccaaagtgctgggattacaggcgtgagccaccacacccggctgacttttgattttctcattggaactaccacaaattgcattcccaccttccaatctcctgtatcttcaggaaaccatttgctttagcagtcttctacttagccacttccactgtgttatgtcattggggacaatggatagctttgaatgtaatttgtctcatttagaaacaaaataaaatcagagtgggtaggtattaatagttggagattattcagtagtacaagcttcttagtttacagattattatatatccaaatacatttcttaccagtgtaaacattcaattacaggcataccttggagatattgcaagttcagttccagaccctccaataaagcaaacaacataataaagcaaattacacaattttttagttttccatgtgtataaaagttatgttggctagatgtggtggctcatgccaataatcccagcactttgggaggctgaggcggaacaattgcttgaggccagaaattggggatcagcttgggcaacaaagtgagaccctgtctctacaaaaaataaaaaaaattaggcagaggttgtggcacacacctgtagtctcagctactcaggaggcttaggcaggaggatcccttgagcccaggagtttgcagtggcagtgagccctgtttgagccactgcactcctgcctaggcggcagtgagacttgtttcaaaaaaaaaaaattatggttacactattaatatcttaatatatatatataaatttttttttttgagacggagtcttgctctgtctgtcgcccaggctggagtgcagtggtgcgatctcggctcactgcaagctccacctcctgggttcacaccattctcctgcctcagcctcccaagtagctgggactacaggcgcccgccaccacacccggctaatttttttgtatttttagtagagacagggtttcaccgtgttagccaggatggtcttgatctcctgacctcgtgatctgcccgccttggcctcccaaagtgctgggattacaggcatgagccactgcgcccagcccttaatatatttattgtacatatcttatgctttctgtagtctgttaagtgtgcaggagcataatgtctagaaacacaatgcacatactttaattttaaaatactttattcctaaaaaatgctaatgatcatctgaacaatcatctttttgccggtggagggccttgccttgatgttaatggctgctgactgatcagggaggtgtttgctgcatgttggggtgtctgtggcaatttcttaaattaggacaacaatgacattcaccacatcgattgactcttccttttataaaagatttctctgtagcatgtgatgctgttttacagcattttacccacagtagaaattccttcagaattggagtcagtcctttcaaaccctgctgctactttgtcaactaagtttatgtaacattctaaatcctttgttaccatttcaatcttgttctcagcatcttcaccaggagtagattccatcgattccatctcaataaatcactttcctcaatcatccataagaagcaattccagcactttgggaggctgaggcgggtggatcacgaagtcaggagtttgagactagcctggccaatatggtgaaaccctgtctctactaaaaatacaaaaattagccaggcatgatagcacgcctgtaatcccagctactagggaggctgaggtgggagaatcgcttgaacccaggaggctgaggttacagtgagctgaaatcacgccactgtactccagcctggacaacagagcaagacactaacttaaaaaaaaaaaaaaagaagcaattcctcagcagttcaaattttgtcatgagattgtagcaattcagtcccatcttctcatcttcaggttctacttccaattctggtactcttgctatttccacatctgcagttgcttcctccatggcagtctcgaacttctcaaagtcatccatgaggattggaataacttcttctaaactgctgctaatgttgatattttgacctcctcctatgaatcacaaatattcttaatggcatcgagaatagtgacgcctttccagaaggttttcaattttctttgcctacatccatcagaggaatcactatggcagctacagcccttacaaaatgtgtttcttaacttataaggcttgaaagtcaaaattacttcttgatccatgggctgcagaatggtctttttgttagcagacacgaaaacaacattaatctccatgttcacctccattagagctcttgagtgaccaagtgcattgacaatgagcagtaatatgttgaaaggaatctttttttctaagcagcagtaggtctcaaccatgtgcttaaaatatccagtgaactatgttgtaagcagatgtggtgtcatccaggctttgttgttccatttatagatcacaggcagagtagatttagtataattcttaacggccctagaatttgcagaatgttaagggagcactggcttcaaatgtaagtcaccagctgcattatcctcgtatgagaaattcatcctgtcctttaaagctttgaaggcattaatttctcttctctagctatgaaagttttcagtggaatcttcttccacaaagctgtttcacctacgtggaaaatgtgctgtttagtatagccacctgcatcagttatcttagctagatcttctggataacttgctgcagcttccacatcagcccttgatgctccaccttgcacttttttttttttttttttttttttttgagacggagtctcactctgtcgcccaggctggagtgcagtggcacgatctcagcacttttgtgttatggagaatggcttcatccttgaaacctcatgaaccaacatctgctagcttcagacttttcttctgcagcttctgcagcttctgcatctctgtcagcctttctagaattgaggagttagggccttgctctggattagacttcggtttaagagcatgttgtggctggctcaatcttctatccagaccactcaaactttctgcatatcaccaataaagctgcttcactttcttatcattcatgtgttcactggagtagcacttgtaatttcctccaagaactttccctttacattcacaacttggtgaactatttggcacaagaggcctttcagcctatcttggcttttggcatgccttcctcactaagcttaatcattttcagcgtttaagtgagaggcatgcaactctttctttcacttgaacacatagacaacattgtagggttatgaattgacctaatttaaatattgctgtgtcttagaaaatagggaggcccaaggagagggagagagatggggacacagccagtaaatggagcagttagaacacacacatttattgattatatttgccattttacatgggtgcggcttttgacatcctatgacaattatcatagtaacatcaaagatcactgatcacagatcaccatagtagataataataataatgaaaaagtttaaaatattgcaagaattaccaaaatgtgacacaaagacatgaagtaagcatatgctgttgggaaacggcactgacagacttacttgattctgggttgctacaaacctgcaatttgtaaaaaaaatgcaatatctgcaaagcacaataaagcaaagcacaataaaacaagataagcctgtactcataaactttgacatatcttcattacaaaggagaaaacagccactagatatgaaaagatttgcccaaagtcattcaactaggagagaaatgaagactagaaccttgttattagggttaaaaatagtgaaaatcttggtctaataattattttgaattataattaagtcactgttttgtgtgtttttttttgttgttgttgttgttgttgttttttgagacggagtctcactcttttgcccaagctggagtgcagtggcataatcttggctcactgcaacctccacctcctgggttcaagggattctcctgcctcagcctccccagtagctgggatcacaggcacgcaccaccacatccaactaatttttgtatttttagtagagatggggtttcaccatgttggccagactggtcttgaactcctgacctcaggtgatttgcccaccttggactcccaaaatgctgggattacaggcatgagccactgtgcccagccacttttttttctttagaggcaaggtctctttcagtctcccaggctggagtgcagtgatgcaatcatacctcactgcagcctcaaactcctggctcaagcaatcctccctcctcagcctctgtaacaactaggaccgcaggtgtgtgccacaactctcggctactttttaatttttttgtagagtcagggtcttgctatgttgtgtagactgatcttgaactactggcctcaagtaatactcctgccttagcctcccaaagtgtttcaggcatgaactactatgccaggcctattttcattttttttcattttttttgagacagagtcttgctctgtcacccagactggaatgcagtggcgtgatctcgactcactgcaacctccccttcctgggttcaagcaattctcctgcctcagcctctgaagtaactggggttacaggcgtccaccaccacgccaggctaatttttgtatttttagtaaaggtggcattttgccatgttggccaggctagcctcgaactcctgacctcaggtgatcggcttgccttggcctcccaaagtgctgggattacaggcatgagccaccacgcccggccccctttattacatgttctgatttatagtctttctggtaacttagagtatgcatacttgaagcatcatcaagattctcatctagaagagaagagtcaaaaaataataatttgattcaaagaaatagtaagtcttatgcctgtaatcccagtactttgggagaccaaagtgggaggatcacttgaggccaagagttggagaccagcctgggcaacataatgagactcccatctctacacacacacacacacacacacacacacacacacacacacacacacacaaataagccagaaatggtggcttgcacctctagtcccagctactggaggggtggggaaggtgtgtgaggtgagaaaatagcttaagttcaggagttcaaggctgcagtgagcagtgatggcatcactgcactccagcctgagtgacagagtgagaccctgtctcaaaaaaaaaaaaaaaaagataagaaaggaaaaaagaaaagagaaaggaaatactaagtatctgtcacatttatgttatatgttttaatggcattgtctcatggatgcctagttctggaatatttaaatcttcttgtttctttttttaatataatttttcaaattttttggctaatcttctctgtatcattcaaatttgagtatatgtgctgccaaagcaagcaccgtttctttacttttattatacagtttaaaattctgtcaacttttactctgtgatggctcccagatttgctttattttttatttttttgctgttttcagaaatgatgtatttagtttagggctttatcaccacacatatagactactagaatatcttttagattgtctctttttttttcttgagacagagtttcgttcttgttgcccaggctggagtgcaatggcatgatctcggctcactgcaacctccacctcctgagttcaagcaattctcctgtctcagcctctcaagtagctgggattacaggcacccaccaccatgcccagctaatttttgtatttttagtagaggcggggtttcactgtgttggccaggctggtctccaactcctgacctcaagtgatctgcctgcctcggcctcccaaagtgctgggattacaggcgtaagccaccacgcccggcctaggttgtctcattttaaaattttatttattttattatttgccaatttatttattttgaaacaaggtcacccaggctggagtgcaatggcgctatcatggctcactgcagcctcaatctcctgggctcaagtgatcctcccacctcagcctttcccctggtagctgggactataggcacataccaccacacctggctaacttttttattttttgtagagatggagatctttttatgtgctcataacaagaggcaggaggatcacttgcgcccaggagtttgagaccagcctcttgaacttctggctcaagcgatcctcccacctcagcctcccacagtgctgggattacaggtgtgagccactgcacctggcttttaaaaaaattttcttcaagtcatcttgcatactactgtctagaaattgttccagaataaattctaaatgtttttgttttaaatttatatttttagataattttttatctctataagtttgaaattacttattgttaataatttccctttatattgggcatacagtgaagtttttaaaaagtatttcattattctacttgcttagttcaggcattctttttttttttttttttaatttatttttttattgataattcttgggtgtttctcacagagggggatttggcagggtcatgggacaatagtggagggaaggtcagcagataaacaagtgaacaaaggactctggttttcctaggcagaggaccctgcggccttccgcagtgtttgtgtccctgattacttgagattagggattggtgatgactcttaacgagcatgctgccttcaagcatctgtttaacaaagcacatcttgcaccgcccttaatccatttaaccctgagtggacacagcacatgtttcagagagcacagggttgggggtaaggtcacagatcaacaggatcccaaggcagaggaatttttcttagtgcagaacaaaatgaaaagtctcccatgtctacttctttctacacagacacggcaactatccgatttctcaatcttttccccacctttcccgcctttctattccacaaagccgccattgtcatcctggcccgttctcaatgagctgttgggaacacctcccagacggggtggtggccgggcagaggggctcctcacttcccagtaggggcggccgggcagaggcgcccctcacctcccggacggggtggctggctgggcaggggggctgaccccccccacctccctcccggacggggcggctggccgggcggggggccgacccccccacctccctcccggacggggcggctggccgggcagaggggctcctcacttcccagtaggggcggccgggcagaggcgcccctcacctcccagacggggcggctggccgggcggagggctcacccccccacctccctcccggacggggcggctggccaggcggggggctgacccccccacctccctcccggatggggcggctggccgggtgggggggctgacccccacatctccctcccggacggggtggctggccgggctgaggggctcctcacttcccagtaggggcggccgggcagaggcgcccctcacctcccggacggggcggctggccgggcggggggctgacccccccacctgcctcccggacagggcggctggccgggcggggggctgaccccccccacctccctcccggatggggcggctggccgggcggggggctgacacccccccccacctccctcccggacggggtggctgccgggcggagacgctcctcacttcccagatcgggtggctgccgggcggagaggctcctcacttctcagacggggcagctgccgggcggaggggctcctcacttctcagacggggtggttgccaggcagagggtctcctcacttctcagacggggcggccgggcagagacgctcctcacctcccagacagggtctcggccgggcagaggcgctcctcacatcccagatggggcggcggggcagaggcgctccccacatctcagacgatgggcggccgggcagagacgctcctcacttcctagatgtgatggcggctgggaagaggcctcctcacttcctagatgggatggcggccgggcggagacgctcctcactttccagactgggcagccaggcagaggggctcctcacatcccagacgatgggcggccaggcagagacactcctcacttcccagacagggtggcagccgggcagaggctgcaatctcagcactttgggaggccaaggcaggcggctgggaggtgtaggttgtagtgagccgagatcacgccactgcactccagcctgggcaccattgagcactgagtgaacgagactccgtctgcaatccccgcaccttgggaggccgaggttggcggatcactcgtggttaggggctggagacccgcccggccaacacagcgaaaccccgtctccaccaaaaccagtcaggcgtggtggcgcgaggctgcaatcgcaggcactggtcaggctgaggcaggagaatcaggcagggaggttgcagtgagccgagatggcagcagtacagtccagcttcggctccgcatgagagggagaccgtggggagagggggagggggagggggagggggagggagagcagttcaggcattctttacttgagagccacaactctcaaagtctccttggatagaattcagggaatttatgaatttgtatgggtaaaaaattccatttttatttttactaatgtaggggagaacatatgtttccttctatccatcctaggtttagggctgagatctctataacaaaagagagattagcaagagaaaagcatgcacatttatttaatataagttttacacgacacgaggggctccataaggaaataaaggcccaaagaaacagttgaacttgaatgttttttatagtaggtttgatgaagagcagccagtgatgtagaaatgtcatagggcaaagtgtgaacaagctaaatgtaataaactgggggaaactgagaggcctgtttgtttagattcctctttgtgtccctgtgcttttggaggtaaggatgctccttttctctgggtgccaggagagcacctcttacatgacagtcttatgatctacttcaggggaaggtcagaaaatccttcccaggttttatggctgcttctggggagaacagcaggcagaaggtcagagtcaccttcctgcttctgcaatttcctcaaatgccttcagcttaaaatattcaatatgtcaaagtgctgtattttgtgtagggtgtcctgaaccccgtcactaacctctaactgaaagttaggattttcttcaattctgaacatagttcataaaccacggtaatattagcaatacttcatcatcaaaagaaaaacccagatattttcatatcacattagttttttgcatctattttcattatgcttatcactatttcaaatttaggatagctattaactcttatttaatgcatttataaagaagcatgcatattaatatataacaaacttatcttttaacattttaataactgtatttcgatataattagattcctttgtaatcctatatattttatgcatttaaaaacatgattttaagaaggcattcataggctttaacagatagctaaagactaagaacccatgtttttattctactttcaatacttgaaaagttgtggataaaacaaaaattatgttaaaaactgaaaagtaggctgggctcagtggctcacgcctgtaatcttagcactttgggaggctggggtgggtggatcacctgaggtcaggagtttgagaccagcctggctaatgtggcaaaaccctgtctttactaaaaatacaaaaattagctgggcgtggtggtgcacgcctataattccagctactcgggaggctgaggcaggagaatcgcttgaactcgggaggcagaagttgcagtgaactgagatggtgccactgcactccagcctgggcaacagagtgagactccgtctcaaaaaacaaaacaaaactgaaaagtaatcaactaaatacttttaaactataatattctatacacttttgatgatagccatgtattatggtattatttatgtttttatatttagcaattcttgttccttaaaatgtgctttatggagaaggagccagagttagtgaaatacgtttaggttaatttaggatatattaatgacattatcccacacattgttcatgtcatagacatgaacttaaaaaatttaaagttcctgctgcctgcttagatgcatctactaatctagagcagttgtaaggaagatccatctgaattagataaaaatatgagcagtggagtattggttattttattctggttggctcagttatttgccaaataaaggccctggtcaaattgttgatgactacgtaaaaataatttggactaatacattaaattgttgatcattaaaataattcttccaaagtgcttgtcttttatgcatttctttactttaacataatataaaaatatgtgttgaatcctctttttttaagacagggtcttgctctgtcacccaggctggagtgcagtggtgcaattacaagctcactgcattctcaacctcctgggctcttgtgatcctcctgtcttagacatctgcatagcagggaccacaggcacacaccaccactcctggatagtttcttttttatttttgtggagacaaggtctcactatgttgtccaggctggtcttgaactcctgggctcaagacgatcctcctacttcagcctcccaaagtgttgggattacaggcatgagccactacacgtggcgttttgaatcctcttctgtacaaagatacaatctgagtccttaggacatttatagcctaatattttcttccatcaaagttgctaaaccccatcaccagaataccacaattaatattctcaggatagattattaatagttgcctaggaataagaatggtatgtggcaatgatagaaatttgaaatggcagatttattaagtatttttaagccatcaagttacaaaaggctattaggggtcttaaaaagacaaagagtatacaataaaacaataagcaattacagattgttttaggttgaacaatttttgtacagttatatctatagtacattactaatttacttagcaaactttatcctgagatttgcaaatttaaaaaaatgaagaatcaaactatattttcttttctgtttttttgaaacagagtctccactctgtcatccaggctggagtacagtggtgtgatctcagctcaacatagcctcaacctcttgggttcaaggaatctcgtgcctcagcctcccaagtagctgggattacaggcatgcaccaccgtgctcggctaattttttgtatttttagtagagatggggtttcaccatgttagccaggctgctctttaactcctggcctcaagttgatatgcctgccttggcctcccaagtactgggattacaggcgtgagccaccgtgcccggcctcaaactatattttctaattagtacagtaaatacacattaatcatgacacaattatttcttctggatacagcaggaaaaattaagttaagagaaagtgcttcatatttcttgatttgttataaaaaggagagatcctctagatttctgggtaagagggaaagctagcaatcccacaatgatttcctttatttcttgccatccgaatatatccttcttcaccaaagttgtggccccagctttagaaaaagaaataatacaaaattacaaatgcgtacaatcaaaccatgttatcaactttttatctcattgtttttctcctataagtgattacatatgaaaggccgtaaaacaaaattagaatgaaataaggtaataatttctccagggatttcaggtaactcaaaataatggtttggaaagctttagtgctatattgatgaatagacttaatacctaaggaaaactatagtaagatccatcccagtcctttaatcctcctactttgcaaatatgccttctctaaagaaagagtattagtatcctttataagcctttatctctaaattttttgataacagtatcatgtgtaatgattttctatcaaacttaaattcctctagagaatgtcaattaagaaatatttttgagtgactactatgaaaaaggtatagggcagggaattctaaagcaaacaacaaaaatgcagctctgaaagagctttttgatctagaagtggagctgactttctcataattaaagctattgaaaaatgagccaggcatggtggctcacacttgtaatccaagtgctttgagaggctgaagtgggaggattgtttgaggccagagtttgagagcagcctgggcaaaatagcaagtccctgattctacaaaaaaaatttttttttaattagccaggcatggtggcatgcacctgtattccttacctactctgcagcagaggctacttgttagagatgttgcagagaaaaatcatgggtcggattagggttcgagtagatcagtgtttcactttttgatttaatggacttagaggagttcaaaaagtttttacagatagatatacagttatcaattttaaaattagcatgtatggacatcttttttttttttttggaggtgaagtttcgctcttgttgcccagactggagtgcaatggtgcaatctcagctcaccgcagcctccatctcctgggttcaagtgattctcctgcctcagcctcccaagtagctaggactgcaggcatgtgccaccacgacggctaattttgtatttttagtagagatggggtttctccatgttggtcaggctggtctccaactcctgacctcaagtgatctacccgcctcaggctcccaaagagttgggattacaggtgtgagccaccacgcccggctgtatggtcatcttttttaaaaagcatactattggtcgggcacggtggctcaagcctgtaatcccagcactttgggaggcagagacgggcagatcatttgaggtcaggagttcgagaccagcctgatcaacatggtgaaaccccgtctctactaaaaatacaaaaactagctgggcatggtagcatgagcctgtagtcccagctactcgagaggctgaggtaggagaatcgcttgaacctgggaggcaaggcagaggttgcagtaagccgagattgcgcctgtgcactccagcctgggcaacagagtgagactgtctcaaaaaaagaaaataaataaaaaccatactacttactgtcaccattatgttgtaaaagaaaatacattttaacaccaaaagcaaaaaatccaaagacataatctctattttaaggatagtcttttgagtaaataaatttatattaatgaaaaagtcaccaaaatattcttatttttcttactttaccaagactgatgaaaaaacttagaaaatccttgtaagaggaatgatttctgaagctctttatcattctgagattttatagtggtaggtatataaatatcatacaaggcaaaattcattaagtgctctaggatacaaataaaagtgtgaaattgagaaaatgcctagtgtgtctggagagcagtaagaaatttagttgaaaggaaaactggatatctttagtagaatagtggaaaaagaggatagaaagctggtttggggccatgttgtgaacagcttagaacagcaggtggaggaacatgtacttcaattacaaaggcaaagggaagctgttagaaattttggctcagggactcaaagtttgtgtttttgcatgcagtggagaacctaagaaatgctggtttattgttggaagacaaatgacaccatttaaaaggactgtgctttaagaggccttaaatattctatgtatcagccctcattggacattttgcaggtcctatttttttctctctgtaccatttaacacacttgtctactcccaccttactggtctcttggcttcaagacactactatgttctgattttcttatctctctctggtcagtccttctcaaacattttcatgagctcctttctttacttcctttcacttaattgccactccactgcttagaaattgtcaatggctctccatgcctttacaataaaattcaaactccatcgtcacctctaataaaccactggctgtagtgggtttttttgtttgtttgtttgtttttgacagagtctcaccgtgttgccctggttggagtgtggtggtgcaatcacagctcactgcagcttcgacctcctgtgctcaagcaatcctcctgcctcagccttacaagtagctaggaccacatgtgcataccaccatgcttggccaatttttttttttttttttttgtgatggagtcttgctctgtggcccaggctggagtgtagtggcacaatctcggctcactgcaagctccgcctcccgggttcacgccattctcctgcctcagcctcctcagtagctggaattacaggcgcccaccaccacgcctggctaatttttttgtattttttagtagagatggggttttaccgtgttagccaggatggtctcgatctcctgaccttgtgatctgcccgcctcagcctcccaaagtgctgggattacaggcgtgagccactgcgcctggcccaattttttattttagtaaagaagaggtctcactatgttgcccaggctgtagcaatgctcttttaatatccagtttgataagcaaaagcaataacaagaatccggccaggctattattaatattaatagacaccacttatttagcacttactctgccaaacagattaacataaattatctaatttaatcatcatcctgtgaggtgaatattatcttcttttactaaagaaaaaaacagaagggcagagtggtaaagtagcttgccaaaagtcacatagatagtaaattgtgaagccagaggtcaaatctaggattattttattccaaagcccactctaacttttatctatgcctatccctacagttatctctgtgagtgaagtcatatggggaatgaaattcagaccagtacatctaggatctcatgtaatttatatcctactatggtcactgcattaaataataggtaaaataaatcattttaggtgaactgaatttggacctgagttctagtatgaaaattgaattgagggtctagttactagcagtatgaattcagtcagtgagaccaaggaatcccagaccccattcaacatctaaacaatttacttttctcagttttaccgaccaagatcaattgcccccagttttgcaaaagatcccagacctctttttgactgagtcctgctaacttcccttaaacaatgaaactgataaaaaaaaaaaatcttaagctaaataaagtatctgaggacaaagtcttgccttcagaattatacaagatctgctccaaatgttcatttcggtacttaccaagttgtatatttttattaattctatagctctttcactcaaactgttcaactttaggtgagtttgttaactaaatgcctatctcataagagtactttaaaaattaaatgagagaatgtatttaaagtactcacacaatatttggtatatagccaatgcttactaagtgaaggtagctatttttattattatccaggtatgagtacatcagattggactcaagtagagtccatctacttttttttttttgagacggagtttcactcttgttgcccaggctggagtgcaatggcacaacctcgcctcactgcaacctccacctcccaggttcaagtgattctcctgcctcagcctcctgagtagctgggattacaggcgtgcgccatcatgcccggataattttgtatttttagtagagatggagtgtctccatgttggccaggctggtctcgaactcccaacctcaggtgatcctcccacctcggcctcccaaagtgctgggattacaggcgtgagccactgagccgggctgagtccgtctacttttaaaaaaatgtatagcgttcttctagggtgatcaccagtcccagtttgcctgggactgtcctgtttttaaaaagaaagtcctatgtcccagaaagcctcgtagcccttagcaaagtgggaaagttgatcaccctaccttctccttgcatattataaggctactaacttattattccttctaaaatcaatgccagtttcctttgtaatagactgaagtcctgggcttcttaggctgtgccagacactcttctaggcattaggattacagagacaaagtctttctaaagcctaggttctagaggagaaacatatgataaacgaagaaatacttgatgatatatatgattagtacaataaagaaaaataaagcaggataagggatacagagtgttaagagacagggctcaattttaggtggaatggtcgggaaaagcttcgctgagtggatgtttgcgcaaagatgcaagtgaggcaaagacctggataaagggctagaaataagcatgatgtgtcaagaaatagccaaaaggctaatgtgctgggagctgagtgagagaggggagagtagttggagaggtagttggagaggcaggctaaggccagataatgtcatgctttacaggtcatgggttttattctgagtgggaaggaaagccattagagggtttggggtagaagggtaacataatctactttatgctttaaaaagataattctggttactgtgtagaggattgattccaagcaaacaagagggaagcagctaccagttatgagattattgcaatagaccaggagatggatggtggcttgaactctaatggtaacagcagaggtattgagaagtgcaagcaaatcttgttttattgtgctttgctttattgtgcattgcaaattttgcatattttacaaattgaaggtttgtggcaaccctgcatggagcaagtctatcggcacaatgtttccaacagcctgtgctcactttgtgtccctgtgtcacattttggcatttctcataatatttcaactgttttcattattagcaaatctgttatggtgatctgtgatcagtgattttttttttttttttgagataggatctcactctgtcatccaggttgttgtgcagtggcacaatcgcagctcactgcagcctcagcctccaggtctcacgctcctgcctcagcctcccaagtagctgggaccacaaatatgcaccagcatgccagggtaattaaaaaaaaaaactatctgtagagacagagtcttgctatgttgcccaagctgggatcagtgatctttaatattactattgtaattgtcttggggtgccatgagccacgtgcatataagatggtgaacttaactgataagtggtgtgtgttctgactgctccactaactgacacttcccccatctctctctctctcctctggcctcccttttccctgagacacaatgatattgaaattaggccaattaataaccttacaatgggccaggtgcggtggctcacgcttgtaatcctagcactttgggaggccaaggcaggtggatcacctgaggacaagagttcgagaccagcctggccaacatggcgaaaccccgtctgtactaaaaatacaaaattagcagggtgtggtggtgcgtgcctgtaatcccagttactccggaggctgaggcaggagaattgcttagaacctgggaggcagaggtttcagtgagccaagattgcaccactgtactccagcctgggcaacagagggagactgtctcaaaaaacaaaaacaaaaaacaaccttacagtggcttctaagtgttcaagtgaaaggaagagttatacatctctcattttacatcaaagctagaaatgattatgctttgtgaaagccaaggtaggctgaaagctagacttcttgaaccagttagccatgttgtgaatgcaaagggaaagctcttggaggaaattaaaatgctactccagtgaacacatgaatgaaagcaaaacaacaggccaggtgcagtggctcatgcctgtaattccagcactttgggaagctcaggcgggtagatgacttgagctcaggagttcaagaccagcctgggcaacaagctaaaaatacagaaattacccgtgcctggtggcacatgcctgtagtctcagctacttggagggaggcggaggttgcagtgagctgagattgtgccactgcactccagcctgggtgacaaagtgagacctgtctcaacaacaacaacaacaacaacaacaacaacaaaaagaaagaaagaagaaaaaagtaaagaaaaaaagtgaaacagccttattgctgatatgatttgagtggcctagataaaagagcaaactagccacaacatgcccttaagcgaaaacctaatccagagcaaggccctaactctcttccattgtaagaaggctgatgaaactaaaattaaagaagttaaataacctgccgaagttcttctatgcctccagtgcaacctatgccacctcgattttagcatttatcacattgagttgcaatggactacacatgcacctgcctgtttccttcactccattagactatgagtaccttgagggacggtagaagagctgcatttttcatttccaatcgctagttcctagcttggcacatggtaggtactcaatacatgtttgttgaatcagtgtccaaatgaagatgcaaaaatgaacaagagactatcctaccttgaagaagtttacattttagtgaatggggcatggtttgcacaaatagctataacacaagggatatgtgtaaaatactataatagaattcataaagcattgccaaagcttaggaattagagaaacaattctaagtgaatggggtatgaaggagatagtatttgaggcaggatttaaaaaatgaataggatttgtaatgacttttttttcattttaaaattaatacctttcttttttttccttccttttttgagacagagtctcgctctgtcaccccggctggagtgtggagcgcagtggtgtgatcttggctcactgcaagctccgcctcccaggttcatgccatcctcctgcctcagcctcccgagtagctgggactacaggcatgcgccaccacgcctggctaattttttttgtatttttagtagagacagggtttcaccgtgttagccaggatggtcttgatctcctgacctagtgatccacctgccttggcctcccaaagtgctgggattacaggcatgagccactgtgcccggcctccttcctttttttttcgagatagggtctcattctgtcactgaagctagagttgagtgatgtgatcatggctcactcacagcggcctcaacttcctgggctcaagtgatattcccacctcagtctcccaagtagctgggaccacaagtgtgtgtcaccatgcctggcttatttttgtatagagatggggtctcactatgttccccatgctggtcttgaacccctgggctcaagcgatcctcccagttcagcctcccaaagtgctgggattacaagcatgagccactaagcctggttggacatactatgtttaacttaaatttttttttgacatagggtcctgctctgtcacctaggccagagggcagtggtgtgatcatggctcactgtagcctcaaactcctcagctcaaaaaatcctcctacctcagcctcttgagtagttgatattacaggcacatgccaccatgcccagctaattttttaaatttgtttatagagactgggtctccctatgtttctggtcttaaactcctggcctcaagtgatcctcctgccttggcctcccaaagctctagagttataagcatgagcttaccacattcagctaatatttatactacatataaattttgtatttatgtgtatcttttttcatttaaatatatatcccaagtattttattaggttattaataatagtctgaataaatctaatgcatggagttgattatgtcatagtttatttaatcatatacctattgttaggcatttttggctacttactagtttttactattaaataataatgctacaattcacataagttgtgtatgaaagttttcccatatttaggattattttcttcatatagattccaagaaataaaagtaatgggacactggctgtgcgcagtggcttgcgcctgtaatcctggcactttgggaggccaagacaggcagatcacccaagatcaggagttggtagaccagcctggccaacatggtgaaaccccatctctactaaaaatacaaaaattagccaggtgttttggtgggcacctgtaatctcagctacttgggagactgaggcaggagaatcacttgaacctgggagacggaggttgcagtgagccgagattgtgccactgcactccagcttgggagacagagcgagactctgtctcaaaaaaaaaagggggggggaagaatatgaacatttaaaaagttctttatcatattgtcaaattgcttccaagaaagagaataggcagggtagggtggctcatgcctgtaatcccagcacttggggagaccgaggtgggcagatcacgaggtcaagagatcgagatcatcctggccaacatggtgaaactccatccaacatggtgaaactccatctctactaaaaatacaaaaattggctgggcatggtggcacatgcctgtagtcccatctactcgggaggctgaggcagaagaattgcttgaaccttaaaggcagaggttgcggtgagctgagatcatgccactgcactctagcctggtgacagagtgagactccatctcaaaaaaaaaaagaataaatacagcttactttcccatcaaactgtataagaatgcccatttcaccaagacaggtgggatttctatagacagcattggacttcacaggcatttcagaaagatacagcatatataaagaaacagaggtagggatgtatctgtaaacttagggaatgatgaataagtagttcactgtggccagagtatgactgtgggtatatgaaaatatagtggaagaaatgtctaaggttatgttaaaagctagataatggagtacctggaatgcctggccaggagtttggacttcatttttagacaatggtgaactattcagaatttttgagcaggagttgacatgatctatattttaaaaagataccgctatagctgggtagaatggaatctgaattacagcagggccattgggaatggcaaagagaaaatacatataaaatatgattcacaggccaaatggatagggctgggtgggttgaggggggaaaaggaaaaggccaagatgatgcttaggctttaataatctgaagatggtaatatattacccaaaataaggaatagttttcccttgagcttgtttgaaaatccttttcagggatgagggaagaaaggaagagaagaacattgtaaacttattgagtatgagagtgtgtatatgttggtagtagggtgatgtaggtggggagtttggatttttcaaggagagctgccaaattggaagttggacaaggaagtgtgtcacttaggaggtcattttcagagattatgaactggggatcatctacataatggcaatagttgaaactgaaggagcaggtgagtttgctttgatatagatgagtttgctttgatatagcaaactcatgtaacaggcaggtggataaaataacgtaagatatgaggctaaagttgatgtagcaaaatgaatcaagatagtgagaaatgtgccattgcatatgttttttgggtcattgagagcaactttccaacctctaacacactttcctcctccaatacatgaacaattccatacatctggaaacttgattcaaatagtgtcttctctgtggaggtttaggctgttaggcatttcctcttcaacagtcccatagccatttagacatgtatcattataccacgatgtgtttgttgtatcgtttaaaaatacatctaggctgggtgcggtggtggctcacgcctgtaatcccaacactttgggaggctgggagatatatatatatatatatatatatttataaatatatttatatttatatatagagagatttatatgtatgtatacataatatattatatatgtatattatgtatacataatatattatatatgtatattatgtatacataatatattatatatgtatattatgtatacataatatattatatattatatgtatattatgtatacataatatattatatattatatgtatattatgtatacataatatattatatattatatgtatattatgtatacataatatattatatattatatgtatattatgtatacataatatattatatattatatgtatattatgtatacataatatattatatattatatgtatattatgtatacataatatattatatattatatgtatattatgtatacataatatattatatattatatgtatattatgtatacataatatattatatattatatgtatattatgtatacataatatattatatattatatgtatattatgtatacataatatattatatattatatgtatattatgtatacataatatttatatattatatgtatattatgtatacataatatattatatattatatgtatattatgtatacataatatgtacacataatatttatatattatatgtatattatgtatacataatatttatatattatatgtatattatgtatacataatatttatatattatatgtatattatgtatacataatatttatatattatatgtatattatgtatacataatatttatatattatatgtatattatgtatacataatatattatatattatatgtatattatgtatacataatatattatatattatatgtatattatgtatacataatatattatatattatatgtatattatgtatacataatatttatatattatatgtatattatgtatacataatatattatatattatatgtatattatgtatacataatatattatatattatatgtatattatgtatacataatatattatatattatatatgtatattatgtatacataatatattatatattatatatgtatattatgtattatattatatattatgtatattatagattatgtatgcatacataatatgtattgtatattatgtatgcatacataatatgtattgtatattatgtatgtatatataatatatattatatatattttttcatgttagattgtgagtgcctttaggacaggatggtttcttactattttttgtatctccagggcctagataatgccagtcacattgtagatgcctagtaagtgcttgttgaatgaatgagtgaagagaagcagatttgaatttcaacactaaaagatatagatgatcttcaagagcaacttcagtagagaagggaatttagaacacctgccgtagggagttccttagagagtcaataagatatgagggaaatagtttcattttaaaaagctatcactggtctacacccaagctgatcagtgctgtgaataggttatcagtgaaccaagatattgatcccctcagctactttccccatgggccatacgaatatcatcatcttctatgtgtgccacagtgggaaaagggtaggaaagcaccttttgtttgatttgtagactatgtacttcaagtaaagatttaaggggtgttatgggttgcattgtgtccccacaaaattcatgttggaatcctaacctccagtacctcagaatgtgaacttatttagagatagggttgatgtagacataattaattaaattaagatgaggtcattagggtgggtcctaatccaacatgaatgatgctcatgaaaagggaaaattggccaggcgcagtggctcacacctgtaatcccagtgctctgggagaccaaagcaggaggatcacttgatcccaggagtttgagaccagcctgggaaacatagagagatcctgtctctacaaatagaaattaaaattggtctggtgtggtggtgcatgccagtagtgccagctactttggtggctgatgtgggaggattgcttgagcccaggagtttgaggttgcggtgaacattgatcaccccactgcactccagcctgggtgacagagtgagaccctgtctcaaaaaggggaagaaagtaaaattatgaatagagacagaaatgcatacagggagaatgtcatgtgaaaatgaaggcagaggtcagggtgattgtcctaaaggctgaggaaagtcaaagatcaccagcaaactttcagaagctaggggagaggcatcaaacttttttttttaattaaaagaacatatttaattgacagattgtataaactcaaggtatacagtgtgatgacttgatgtatgtgcacattgtgcaatgattgacataatcaaatgaaataacacatccatctccacccgtgctgtacctttgattcccagaatctgttcatcttatacctgaaagtttacactctttgatcagcatctcctcattacccagcctccagtccctggcagctatcattctactgtctgtttctgtaagtttgacttttttagatcccacatataagtaagatcatacagtttttttttcctgtgtccacgaatattttcttcctcacagcgtgagaaggaagtaacaccttgatcttagacttccagcctccagaactgggagacataaatttctgtcatttaagctgctcagttcgtggcactttgtcatggtagccatagcaaactaacacaaagagaaactccaggtatgccccaaagtctcaactcttcatatttcctccattttttccctctagaagttatgttccttttgtttatgagtgatatagatgtcagttcaatacatatattgaggggcctttaggtgccacccacttagtctgtgctgcggatatgaagaccagacataatctctccccaaaggcacgtacagaacactggagtgacagacaggtaaatatacaatttaaatataatgcctaaaatcctgtgatccagtatgcataggacattttggcagcatagaaaaaagacatgttcctcagcccaaggattcaggaaagacttttctggaatagattgtgcctgagctacttctgaagaaaaggagaagtaaaccaaaagagaagacaggatgttctaggcagagggaacacaaaccaagatatgaaggaaggtattacagataaagtggaatgtatgggaactacaactgtggatagtgcagtataaccagagtgaaaataggaggcaacaaatgccaggaggtgaggctggcaaggcagggagcacagcctataggatttgtcttctgtcagggaacattaattttacaccgaatgaaactcagtagaagagttataagcccagactcgttcatattttagacaaataagtttggcagcagtatgaaagatggatttgagggtaaaggggaagaaaatagagagtaaaggagaccagttagaagggtacagcaatagtccacactagagatgcctgaactagagccgtaatagaagaaacagagaaggaacagaatcaaggacatagataaggtaaaattggtttgactaattggttgcttggttggacttggggaggtctcagatgaatccatcatatcttattgggtgattgtgttgtgtggccctttactgatatgggaaattctgaaggaggaacagtatgggggagagagtactgaattatttggatgtattgagtttggaaagactaagatatatgtaagtgagtgtgtccagataagtctgaagttctgggaagatgtcagaactagagctagagattcaaaagctattggcatataaaggttatagctagagtcctaagagtggaattatagcacccaagaaaaaataaaataagaagaggaatgggcagatgatagagccctggggaaaactaacatttttgggctaaatagaggagaggaataggttcatgagagaggctgagaaggaataatcacagaagtagtacagaagataaaccaggaaaacaaagtgatgaaggcagaatggtaagtgaaaagatgggggcactgagtaatttagaatgtcactttgtaagaagctataaagttcatcattgtcaatatcgtgatcataatgatcatcatcaaaatcatgagagtatttgctgaaactccctcaaattcctgattccaattaaatataaagtgtaaatatattacctgtttttcacaagccagtattctttcccattaagatcaccatagccaaccacaagtacaccatgattcacattctgagtacaggatggttcatagtagacacctgagaatcaaatatgggtgggaaaaaagagtgaatactataggataataaagggcattttaaaacggtattactttttattagcctgctttggatacatagcaaggttaatttaaaaagttaaggacatgtccaggcatggtggctcatgcctgtaatcccagaagtttgggaggccaaggcgggcgggtcacaaggtcaagagatcgagaccatcctggccaacatggtgacaccccatctctactaaaaatacaaaaattagctgggcatggtggcacgcacctgtagtcccagctactcaggaggctgaggcaggagaattgcttgaacccaggaggcagaggttgcagtgagctgagatcgtgccacctcactccagcctggcaacagagcaagactccatcttaaaaaaaaaaaaaaaagtcaaggacatatactgtcatgcataaactagggctcataattatttgccaccaatgctgtatttgtcagtgttcttgccaagcttagcatcactccagtcatagttcccccagaaaccttctttgataagcacaccacctttttctaagtttttttcttttttgtttttttctaagtatttttaaacttgcatacaatcagttattttaattctctgtgtatacaggcatatctcattttattgtgctttgctttattgtgctttgcagatattagcttttttttttttttaaggaacagtgttttgctctgttgtctaggctgtaatacaggtggtatgatcatagctaattgtaacctcaatctcctaggctccagtcatcctcctgatttggcctcccaaagcgctggaattataggcatgagccactgcacccagctagatattgcattttttacaaattgaaggtttgtggcaactctacattcagcaagtctattggtaccattttcccaaaagcatgtgctcacattgtgtccttgtaccacattttggtaattctcacaatatttcaaactttctcatcattattatatctgttatggtcatctgtgatcaatgatctttgatgttacttcataattttgagggtgagctacaaaccacacctatataagatagcagacttaacccacaaatgttgtgtgtgttctgactgatccacggactggccacacccccatctctctcctcaggcctccctgttccctgagacacaatgatattgaaattatgccacatgataaccctatgatagcttctaagtgttcaagtaaaaagaaaagttgcatatctctcactttaagtcaaaagctagatgtgattaagcttagcgggaaaggcatgttgaaagccaagacaggccagaacctagcctaggccacttgtaccgaacagtcaggcatgctgtgaatgtaaaggaaaagtgcttgaaggaaattaaaaatgctgctctgctgaacacacaaatgacaagaaagtgaaacagccttattgctgatacagagaaaatgtgagtggtctagatacaagagtaagccagcccagcatgcctttacgccaaaacctaatccagaacaagaccctaactctcttctattgtaagaaggctgagagaggcgaggaagctacagaagaaaagtttgaagccagcagatgttggttcatgaggtttaaaattgcctcgcctcaccccgccccgcctcaccccgccccgccccgccccgccccaccttgccctgccctgccctgccctgcccctctttcttccttctttctctttctttcttccttgttttttagagacaggttttcactctgttgcccaggttggagtgcagtggtatgatcatagctcactgtaacctcaaattcctgggttcaaggagtcctcctgcctcaccctcccaagtagctgagactacaagtgagtgtcaccatatccggctaatttttatttttatttttcgtagagataagggtctcgcgatgttgctcaggctggtgtcaaactcccaggctcaagcaatcctcccacctcagcctccaaagctagaattacaggcatgaaccaccgtgctcagccaatatcctttctttctttctttaaattctaattattgtttattttattttttaccacttctgtagaggaagaaagaaggatgacgcgcatctacaccaacagacactgggcctttattggccacagcttctttcaggacatcttctctgccataaggaagttcagtgtactttgaacatgtggcagcacgatattttgagtcatattgacatttctgatcctgcaaaaagaagtataaatatgatgaagtatacttcaactcctgtataaatcacctgtatcctaagcctggattttaaatgtctcccttcctttctttaactttttcatgtgtctaaggctccttcctttgcaaatcttccaaatcctaacagtcccgggtttcagcaataatggaggaaatacagaactattctattctttcaaattgtgaacatcctcatacatgcaaaacttgccaggacaatggcccctcagactttcaggtggactgtagggaaatattacatagagataataaactctagatgagagctttaaaatctttttgatgcctgcaagatgatctgcagctaaaatgatggtatataaagaccatataatatgggaaacacaagtatttcaagtgggaaaaggaaagttacaaattcatgtttgttgtatatacaactattttgtatttatttatattatttatttttttgagataggctctcactccattgtccaggctggagtgcagtagcataatcatggctcactgcagcctccaactcctgggccaagtgattctcccacctcagcttcctgagtagctggaactgctactcaggtgtgcaccaccatgcctggctaatttttttgatttttagtagaggtgaggtctcactatgttgcacaggctggtctcaaactcttgagctcaagcaatcctcccacctcgacctcccaaagtgctgacattacaggtgtgagccaccacacttggccaactatgttttttaagtgcttaacaagaaaataacttgaaagaaataaaccaaaacaatagtggttaaggtagaaggtttttgagtgatatttttatatttttaaaatcttctgtaacatggacacaatccttaggttatcgttatatcaaaatgtataatgaatttctgaggaagaggagagtgttatttagcttctcagtgggtggaagaatgatgtggttaatgatctgagaataaggttgagcatgggaggctgcagaagaaaaagtttaaatacagagaaataattttaaggatagtttgcttaaaatctgtttaattttgggatggagtcttgctccgttgccgaggctggagtacagtggcgtgatctcggctcactgcacctccacctcctgagttcaagcgattctcctgcttcagcctcccgagtagctgggaccacaggcatgcaccaccatgcctggctaatttttgtatttttggtagagacagggtttcaccacgttggccaggctggtctcaaactcctgacctcaggtgatccacccacctcggccttccaaagtgctgagattataggtatgagccactacgcccagtcattaaaatctgtttttaagcatgaatgctacttccttatttgtactactgatatattaagaagagtacttcatcagaaacagaactcttgagaatttaagaattcctcttcagggttctctctcacacacaatactgcttctcaagcaattggcatggtggcaagcccagcacagtcagtcagtggataacatgagatcatggggcagcacaaaaagtttgcttaagacgcaccatggctttgtagggataggaagcgtctgagtcgatgcccttgttatcaatgatgtactggaaagccgttgtcatgaagccaccattgcagcctttgtttccatatttttcagttgagcaatccaccaggttctgggcactgagagacaccagctttcctgttttcagcttcagctgtgcttccagggcccccacagcactgaaagcccagcaagcaccacaagaaccctaaaacagatacaaggtcacaaacgcaaatcacagaaaatcattcggaatgacttccataacccaaactggacaacgctcagctacatcagttctgtccctagttcccagaaagagctcccccactacagtttccttctgtctttaacaatgggaatgaagactaaatttaactcaattgttatctaggcaaggtccaaccttgatagagatttgcaatcagccaagctcagaacataatggccatattcaaatatacttagaaacaatactcactgagcatgtaccaaattgcacctattttcacccataagtaagggagatagttgcctacagtaatgagattttgagagagctaggatgatttccttgacctaaaataccctttctcctgtcatatgatgcctgaaacataagaagtttaatcctaggttggcatttttcaaacctttgttatcttcagaatttttttgattaaaaaatattttacaaggaggcataaacaaacaaaaaaaggcaaagctgctttagttttaaaaggggcagagtgtccagagccccatcataattgttctctttctctctccttccctcctcccaccttgctctccaccaaaaggaagcaaactgacattgcttttgattgaagcaaaattgttcattaaaatgcaagcacccagagaaaggagctcattaacttactcagagttaacatctaaatatgtggtttattgggtcttctaaaagctgttattttagagaacctcgggtaagaaatccaaaactaattgaaagaaaaatatgtaggtggaaaagaataagagattagcagtaccatttacttctttttgtttgtttgttttgagacagggtttccttctgtcactcagactgaagtgcagtggtgtgatcatggctcactgtagcctcaacctcccaggctcaagcgatcctcccatctcagcccctcaagtagctgggactacaggagcgcaccatgcctggctaatttttatttttattttttgtagagtcagggcctcactatattgcctaggttggtttctaactcctgggctcaagcgatccttctgcctctgcctcccaaagtgctggaatcacagatgtgagccactgtgcctggccaccatttacttcctaataaatttttactttcttcattgatcacaacctggggtagctgctcagaatgctttgattcctctcacttaccctgacctctatggtgatacatgtgttttacctctaactaatttaggatttttgcaatttttttaaaacaagcaaactaaaggaaaatacaacagcataggaacaataattttacaaggcacatatttcatattctaacgatgcaagactagccatgaattaacttgagtggctcaatttatagaacactctatctctagttctttcttctccttcaactttgaaactcacaagtgaaatggagaaacttcctgatcaccagggctctctcacacaacactgcttctcaagcaattggcttattggagagtccagtgcagtcaatgcatagcgtgagcaataaaagtctgtgttaaacacctatttgcttagttcagtgtttgtctaagtaggtggctctatgatcacttagaaaagcactgtgggggctgaacacgagggctcatgcctataatcccaggactttgggaggtggaggtaggaggatcacttgagctcaggagcttgagatcagcttgggcaacatggcaaaacccatctctgctaaaaatacaaagaaaaaaaaagtggtggtgtgtgcctgtagtcaccgtgtaggctgagatgggaggatcacttgagcccaagaggcagaggttgcagtgagcccagatcgcaccactgcagtccagcctgggcaacagagggagaccctgtctcaaacaaaacaaaacaaaacaaaacaaaaaccactgtggagaatccagttgtccctcagtatccacaagggattggttccaggacctctgagcataccaaagtcaagaattttcaagttccttatataaattactgagtattcgcatataacctacacatcctcctatacacttttttttttttttttttttaagacagggtctcactctatcgcccaggctggagtgcagtggcaagatctcagctcactgcaacctctgcctcccaggttcaagtgattctcctgcctcaccctcccgagtagctgggattacaggcgcccaccaccacgccaggctaatttttgtattttcagtagagacgggacttcaccatgttggccaagctggtctcgaactcctgacctcaagtgatctgcctcccttgacctggaaaagtgctgggattacaggcatgagccactacgcccggccctcccttatactttacctttttttttttttttgagatggagtctcgctctttagctcaggctggagtgccatggtgtgatctcagctcactgcaacctctgcctcccaggttcaagtgattctcctgcctcactctcctgagtaactgggattataggcatgtgccaccaggcccagttaatttttgtatttttagtagagacggggtttcatcatgttggccaggctgatctggaactcctggcctcaggtgatgcgcctgcctcagcctcccaaagtaatggtattataggcgtgagtgcctggcctattttttattttcatttttttctggatatttttgatccacggttggtggaatctgcagatgtggaagctgtggatatggagggccaactgtataaataaaatataatatgtgatccttgcccttaaggaacttataatttagttgggaagacaagaataacaaaaataactagaaagtaacacgtgggactgtaagattcactgtcaaattctgtagctagactaagcatttaaagagctctacctagggttcagaggcttgggatggtaatactcacttgatatttcacttcagtaacacaccctttctctctccagtccacagaatcaggcaatatccgattagggtttgacttatatgtgatatttctctgccactggctgggaactctcagggaactcatcaaagacatcacttcttcactggtctacaaagcaaatatacagtcaggcattgtttaatgactggaatatgttctgagaaatgcatcgttaggtgattttgtcattgtgaaaacaccatagtgtgtacttacacaaacctagagcgtattggctcctacatacctaggctgtatggtagggcccattgctcctaaactacaaacctgcacggcatggtactgtactgaaggttgtaggcaattgtagaacaatatgaagtacttgtgtatctaaatatatctaaacatagaaaaggtagagtgaaaatacagtataaaaagtaaaaatgggagctgggcatggtggctcacgcctgcaatcccagcactttgggaggccgagccgggcaaatcacctgaggtcaggagttcaagaccagcctggccaacatggtgaaaccccatctctactaaaaatacaaaaattagctgggcatggtggtgcatgcctgtaatcccagctatttgggaggctgaggcaggagaatcacttgagcctgggaggcggaggttgcagtgagctgagatcgcgccagtgcactccagcctgggcgacagagtgagactccatctcaaagaaaaaaaaaaaaagtaaaaatggtacttctatataggtcatttactatgaaaggcctggagttgctctgggtgagtcagtgagtgagtggagagtgaatgtgaaggcccaggacattactgtagactttataaacacggtgcactttggctacactaaatttgttaaaacatttttctttcttcaataataaattaaccttagtttaatgcaacttttttacttaataaacttttaattttttaaatgttttgtcttctatggtaaccccttaaaatacaaacacattgtacagctgtacgaaaatattttcttctttatcaccttcttctataagctttttctatttttaattttttaaaagtttttacacttttttgttaaaaactaaaatacaaacacacacacacattagcctaggcctatacaaggtcaggatcatcagtatcactgcatttcgtctccacctcttgtcccactggaaggtcttcaggggcaacaacacgtatggagctgtcatctcctctgataacaatgttttctactggatgcctcctgaaggacctgcctgaggctgttttacagttaactttttaaaagtataagtaggagtacactctaaaataacaattaaaagtatagtatagtaaatacataaaccagtaacatagtcatttattattattaagcattttgtactgtgcaaaattttatgtgctatactttcataccactggcagagcagtaggtttgtttacagcagcatcaccacagacaagtgagtagtgtgttgtgctacattgttatggtggctacaacatcactagctaggcaagaggaacttttcagctccatcataatcttaaaggaccaccatggtatatgtggtccatcagtggccaaaatgcatatgacacatgactatatatctctttcacttacatccttctttcttttctttctttcttttttttttttttttttctcttttgagacggagtttcactctttttgcccaggctggagtgcaatggcatgacctcggctcactgcaatctctgcctcccgggttcaagcaattctcttgcctcagcctcccaaatagctgagattacaggcatgtgccaccacgcccagctaattttgtatttttagtagagacaggatttctctatgttggtcaggctagtctcaaactcccgacctcaggtgatctgcccaccttggcctcccaaagtgctgggattacaggtgtgagccactgtgcccagcctatcctactttctaatatcctaataactgtaactgtgaatatatttaaaaactgccatggaataaaaaaactgagaaaaaacagtaatagttgtgaccaacacaggttccattaggatctggtggggcgaattatctgggtttgtttagtttcacacttggcactagcatcccagctaggcaccctcatggggaaggagaaaaagagaatggtaaaaactagaagttacagggaggcagatttttgtttcaaagcaaggcagaattttataaaagggctgtctaaaaagtggactaaactggtttcccatgtgagaaataattacaaaggagattcctgcatttaagaaggaattcagtctacctagggcgttcccttcttcactttggcaacagtggtaaagttttgcaggacagaacagaatctgaaaaccaataggggattatttgtgatattaaatacccacattctcccattaagaaagcagatgggtcatactaaattgtcaatctagacttaaataagtatggcaacttgctataaaaacctgtcaatagtctttaggtaatactttctagaatttattaaaaaaaaaacaatggtagtctctgagtttaaaatttcctctaaagaagtgatttgttaaagaaagaaagcagtcaaaatagaactaagtaagaaatttctgtacacgttcttacgtccttcaattctactgttttccaactttgtactatacattcctttgttattgttgtttaccttcaaattgcttttggggagacagaaaggaaatgatatttacccagacgtgaaagtgggatttcttgtaatgtacctaccatgtctcccaggtggttcatgcccagatcgtatgagtgcattcccattgaatgctccaggttgtgaagcatcacaaactttagattcttttcccagatgagacgtcgtactgcttcttcattctaaaacataatgaagaagaacatagtcatactgcatcctggacaaataagtgtttgatgatgaaaatggcaattttttttttttttgagatggagtctcactctgtcacccaagctggagtccaatggcacgatctcagcttacttcaacctccgattctcaggttcaagtgattctcctgcttcaaccttccgagtatctgggattacaggcatgtgccaccacgcctagctaatttttgtatttttagtagagacggggtttcgtcatgttggccaggctggtctcaaactgttgacctcaggggatctgcctgcctcagcctcccaaagtactgggattacaggtgtgagccactgcacccgcccaaaaatagcatttttgaagcattctaccaaatgtggatctgcccgagagcatgcaaatacataaatatatccaatataactgctaacttcacatattaatcttaattcttgctcttaactgctttgatggtttaatattattttatgataaacatgaatttccttctctttttaacatttattattattattattattattttgacagagtcttgctctgtcactcggctggatggagtgcagtgaagtggcctgattactgctcaccatagccttgacctcctgggacccagcaatcttcacacctcagcctcctgcatagctgggatgactggtgtgtgccactgcagccagtttttctgtttgtttgtttgtttgttttggtagagactgggtctccctatgttgcaggctcatattgaattcctgggctcaagcaatcctcccctatcagcctcccaaagtcctgcgattattggtgtaagccaccgcgcccagcattttttttttttttttttagacagggtcttgctcttttgcccaggctggagtgcagtggtatgatcatagctcactacagcctcaaactcttgggctcaaactatcctcccatctcagctgcccgagtagctaggactgcaagcctgcaccaccacaaccagcttatttttatttttattttattattattttttttttttgtagagacagggtctccctatgttgcctaggctggtctcaaattcctggccttaaaggatccttcccccttggcctcccaaagtgctgggattacaggcatgaaccatacacccagccatgatttgctctttctttttgatgttttacaacttcgttacatgtatctgggtgtaggtttctttatttaccttcggctgtgtgcttttgattggaggactcaggaccttttctcatatctggaaaattctcaatcagtgtctccacatatattgcttctccaccattccacctaattctcttcttcagaaactcctatccgaagtattttggagcctcaaactctctttcatctctcttacttgcgttttcatatatttttctttttatttctaggtgctgcattctgggtgaattcctcagtactatctttcagattactgattctatccagctctttccagtctggaaatccttttgatttttatcgcaatgacaatattttttattttcaagatttctaatttatttcttgtccattagtgtgcatattattcctttatatatagtcttttgaaaattcatttttgattctattattttaattttattcagagtgaatttacatgctgaccgacgattttcttgtccttcaggagattcatttacatagaatacaatgatgtagaaggcaaggtggatggtgcctcctacagtagctgaagccagagtttccaataagctggaaccccagggagcagtcagcaacaactgtgttctgcctcatttcattgagcgggtgagcccagtcccagaggcactgggtagcaagtctggatgcaggtttctttcccttggagcaaggttttactgttaccccagtaatggacataatgggcatgcatgatgggcttacttccaaaccacaagatgagaagcaatggtataaaggcaaacaaatctaactaagtgcaagaaaggaaaaaaaaaaaaagaagtgcactttgagatcaattataaaggtaggatacgaatcaaaagtcaggttcattcatcctgagggactggaattattaaacagagggatagcattcatttaaccagatagtggtgctaattgcacatctaagtccagtcaatcttgaaatgaggaacctgttcataaagggtgtgggtgagggtgaaattcatcaccaccaacgaaaccgtatgatcatttaaatagatgcaggaaaagcatttgacagaattcaacatcctttcataacaaacattctcaacaaattacatatagaaggaatgttcctcaacacaaataggccatatatggcaagactacagctaacaccatactcaattgggtgaaaatttaaaggccattctgctaagatcagaaaaagacaagggtacccactctcaccatttctagtcaatatagtgctgaaaatcctagccagagcaattaggcaagaaaaataaatacaagatctccaaataagagaaggaagaagtgaaattgcgtttgtttgttgataacatgatcatatagaaagtcttggccaggtgtggtggctcatgcctgtactttgggaggttgaggtgggaggattgtgtgaatctaggagttcaacaccagcctggacaacatggcaagaccccttctctacaaaaaacaaaaatagaaattagccaggtgtggtggcatgtgcctacagtcccagttacttggaaggctgaggcaagagaatcacttgagctggagtttgaggctgcagtaagctatgatcacaccacttcactccaacctgggtgacagagcaagatctcatctcaaaaaaaaaaaaaaagaaggttgggcaaggcggcttatgcttgtaatcccagcactctgggaggccaagatgggttgatcatgaggtcagaagttcgagaccagcctgaccaacatggtgaaaccccatctctactaaaaacacaaaaattagctaggtgtggtggcgtgtgccggtaatcccagctactcaggaggctgaggcaggagaattgcttgaacctgggaggcggaggttgcagtgagccgagattgcgccactgcactccagcctgggcgacagagcatgaatccgcctcaaaaaaaaaaaaaaaaaaagagagaagaaagactccatcaaaaaactattagaactgatacatgaattcagtaaagttgtaagacacaaagtcaacatacaaaagtcagtagtatttttatacactaacaactatttgaaaaagaaattaggaaaacaattctatttacaacagcatttaaaacatatttaggagttaatttaaccaaggagttgaaaagttatatgctgaaaactgtaaaacattgataaaagaaactgaagacaaaataggccgggcgtggtggctcacacctgtaatcccagcactatgggaggccgaagcaggcagatcacctgaggtcgggagtttgagaccagcctgaccaacatggaaaaaccccgactctactaaaaatacaaaattacccgggcgtggtggcacatgcctgtaatcccagctactcaggaggctgaggcaggagaattgcttgaaccccagaagcagaggttgtggtgagcagaggtcacgccactgcaccccagcctgggcaacaagagcaaaattccatctcaaaaaaacaagaaaaaaagaaaaaagaaagaaagaaatttaagataaaataaataaatgggaagatattccatgcttatggattggaagaattaatattgctaaaatgttcatactatccaaagcaaactagaaattcagtgcaatttctatcaaaattctaatgttattcttcacagaaatagaaaaaacaatcctcaaattcatgcggaactacaaaagtccttaaatagtcaaagtaatctttagcaagaggaacaaagctggaggcattacaaaatgcctggtttcaaaatatattacaaaactatagtaatttaaacagcatagtactggcatagaaacagacacatttaccaatggaataggatatagagcccagaaataacctgcaactttatggtcaatcaattttcagcaaaggtgccaagaacacacaatggggaaaggatagtctgtttaataaatagtattgggaaaactggctatccaaatgcagaaaaatgaaattgaacccttatgtcaccccatatacaataatcaactcaaaatgaattaaagcacaaacataaggcctgaaactatatacaaccactataagaaaatataggggaaaactccacaacattggtccgggcaacggttttttgaatatgacccctaaagaacaggcaacaatagcaaaaatagacgaacgggactccatcaaactaaaaagctttcgtacaataaaggaaacaattaacagagtgaaaagataactcatagattgggagaaaatatttgcaaatcatacatttgataaggggctaatatcccaaatatagaaggaactcaaagtaactatcaagaaaacaaccctgtttaaaaatgggcagaagacctgaatagacatttctcaaaacaagacacatacaaatggccaacagatatatgaaaaaatgcttaacatcaccagtcatcagggaaatgtaaagtaaaaccacaatgagatatcacctcacatctgttagaatggctattatcaaaacgatgaaagataagtgttggtgaggatgtggagaaaagggaaccctcatacacttttagtaggaatgtaaattagtacagccatttgggaaaacagtatggaggttcctcaaaaaactaaaaatataattaccatatcatccagcaatctcacttctgggtatatgtcccaaggaagcgcaatcagtatgtcaatgagatagctgcacttccatgttcattgtagcattattcacaatagccaagatacggaatcaaccttataaagtgtccattaaaagacgaatggataaaaaagtgtggtacatattgtattccatacataatggaatactatttagccttaaaaaaaaaaaaaggaaattctgtcattttcaacaacatggatgggtctagagaacgttatgctaagtgaaataagccaggcacagaaagacaagtactgcataatctcatttacatgtggaatctaaaacagttgaactcataaaagtagagagtagaatggtggttagcagaggctgggcggagggtagacagggaaaggggagatgttaggcaaagagtacagagtttcatttgacaagaagactacattctagcaatctattgcatagcatggtgactacagataataataataatgtattttatatgtcaaaattactgaaagggtagattttaaatgttcttatcacaatgaaaggataagtatgtgaggtgctgaataggttaattagcctaatttaatcattctgcaatgtatatttgtatcataacatcacattgtactccataaatagacacaattattatttaattataaataaataaaaataaaacttagagtgtatgacctaagagtgtcatttttatacaaaataatatgtcaaataaataaatatatgatgctagcttacaaacagaaatattacatagttacaggacttagttatttaaagcagtagggttaaggtcttaacatcagcaagtgtgctttgaaataaaaacaaaagtacaaaatgggaagtgatagtcaagaaacaatatctggccacactatgtgggtattaacgccttttcgctcctcagccatcccaaatgtggcccttcctcaggagcttgtgctgatttgcccttggcctgagaccttcactctattatgtattttgcttgctccctggcttccatcaattctctgctcaaatggcacccttatccgtgaggccttccctaaccctcctgtcatatagatagacttcttaccaccaccaccacccagggcccttcctactctccatgccttctgttatttttatctacaacacttatcaccatctagcatactacatatctgcttgtttattttcttatttcctgtctctctcactataatataagctccataacaggaattttgttttgattcctgctgtatggtaccaagaacagtatctggcaagaaacaagtacataatatttatttatttatttttgagatggagtctcactctgtcacccaggctggaatgcaatggcacaatcttggctcactgcaacctccgccttcccggctcaagtgattctcttgcctcagcctcccgagtagctgggattacaggcgcccaccaccacatccagctaatttttgtatttttagtagagatggggtttcgccatgttggctaggctggtctcgaactcctgacctcaggtgatccgctcaccttggccttccaaagggctaggattacaggcgcgagccaccacacccagcttaaatatttactgaaaacactgcctgtaagaacacaattttaagaggtagaaaacagtactcctttaaaagcatatcgctcgagtggcaatccaatctaccttttccttgtattgtttgccataggttttcttccagagatgccagtggtgatccagggtaggatctttatgcaactgtgccactgcagaggagcacaccaagagcacacaaaccagccgtttcattctgtgtaaggaaaggtaacataggaagtgttgctattagctgcatatgttgtgaccacatgttttcataagagaaaataacaatgcaaagtctatcaaagggacagactattataaacagaattatacaggaaaattcctgggatatatagtcacagggaacagctgcagatttatgtcagaaatactacttccaatgcttagtagcactttaaaaagtgatttccaggaatttcccaatatctggtaaaccaaacacatctagagggttagaaaacagggactttccaggatttgccaacaaatctaatcaaaggaaatctctttctctctctctcaaaaaaaaaaaaaaatcatccttaagagagacaaacctctgaaaaatcagtttatctcctgaatttttgaatacatgggctcttcttaactgacctgtttaaatatccacagtctttacagatagttaaaagacaattctcatctattgctttcacatctttaggtaggtaattttcctttttacgtttttttttttttaatgatcagacatctgtttcaaatgaggcaattaactactctttaaaatgccacttctgtatttaattcaagagacatcaacagaaattcagcgactagctccctcaaactggattctactttcttttccatttctttttaattgaaaacatctggaattttaaacatgtaagcctttaaattatattccaaagaaagccatgtttcagtctcaacttagatgcttagatgctcaagcagacattaactttttaaaaatagagaagaggcaaattgaacgacacgattttttagtttacttcctgaaaccaaagatttaaaacctagcaggcagaacaagttacaaacacagagtgtttgaagaccaaatgggagaaaaagaacaaagagtacatacgtgatagaaccagcagttgctcccacagtaagagtccttgaattagtgggctctcttctaagatttcaaagcaacaaggagatttcagttcaattgacttgaaaagaaattggaacttgtcacatgaggtactcaaaatgaggaagtgaactttcatttcagtttcatttaaaatctagctagtacagtcacctctagtcatttccctatggtcttggggacaaagtggatacagtaagccatcaagaagagcccttgtctgagcccagtggctcatgcctataatcccagcactttgggaggctgaggcgggaggatcacttgaggccaggagttcaagaccagcctaggcaatatagtgagaccctgtctctgcaaaaaaattttttttaattagctgggcatggtggtgcatgcttgtagtcccagctgagggggagggtgaggtgggagaattgcttgagtctaggaggacaaggctgcagtgagccatgattatgccactgtgtttcagcctggatgacatatcaagaccctatctcaaaaaaaaaattaaattgaattttaaaaacaccaacttttacatggaaaacatttagttataaagagatttagataaagctccccaaatcccagctccttgtatgatttcctaggaaaacctgtcttactgcttttaacacaactcattcatgatctgatattgtctggttctcactcagccattccttcgttcatcaaactcaaaatgtctttattaatatatactatatgtatagtttagtaatatgcgtgtgtgtgtgtgtgtgtgtgtgtatgtgttagtatattcatggaaaaaaggatacactcaaatatatccaattgagaatgattacctgggtggggtgggagcaagacgaactatcatcttttaaatttgcattttcctaattactaatgaggttgaggatcttttcacacatttattgaccgtttgaattttctgtgaatttcctgttcatcttttttgctcatttttctattgtattgttgcattttcttagtgatttgtgggaggtgtgtgtgtgtgtgtgtgttgtgtgttttccgagacggagtcgtgctttgtctcccatgctggagtgcattggtgcgatcttggctcactgcaacatccacctcccaggttcaagcgattctctgcctcagactcccaagtagctgggattacaggcacctgccagcatgtccagctaatttttgtatttttagtagagacagggtttcaccatcttggccaggctggtcttgaactcttcacctcgtgatccacccgcctcagcctcccaaagtgctgggattacaggtgtgagccaccgtgcccggccaaggtgtatgtgttttaaaaatatattctggcttctaatctttgacagttatatacccttaaaaacatcctcccttagtcttccacttgtcttttattttattttttcttcctttgcataagcctatgaaattccacttgtcctttagtcttgtttatagtgagtttttctatatgaaatttttttatgttgaggtagaacattttattcagcttttccgtataatcaatctatactgtttttgtataagaaaattttcctcatccaaatgtaataaagatacactcatcttatttttatactttcagagagtgttttatttatcttttctatggctactgcttttaggtgtttaattcacctggaatttagttttgtgtatggtatgacgtagggagcttattttctttgttttccaattttgattctacctctattgtacaccaaattctcatacatagataggtcagtttctgagctcatgaagctgttctttttatcttttgctacttcagtatcacacagttttaattaaaacagctttgtaatatgtctccacgtatggtaaggcaagtcatctaggccaccctatctttgttcttctttttaaacattgtctttgtattttgtacttgttaactcttctttatatgaattttttgaatcagtttatcaagttccctgaaaaactctgttggagttttttgcttttttcttttggagacagggtttcattctgtcacccaggctggagtgcagtgatgcaatcatggctcactgcagccttgacctcctgggctcaagtgatcctcccgcctcagcctctggagtggctgggactacaggtgcacaccaccatgcctggctgattttgttttttgttttttgtagataaggggtttcaccatgttgcccaggctggcctcaaactcctgggctcaagcaatctgcccaccttggcctcctgaagtgctgggattacaggcatgagcccccacatctggctattagagtttttatttgaatatatgcataaatttagggagaagtaacatcattataatgttgattcatctcagctgtagtagacatgtttgtgtttgtagccatacagttttttttaaaaagatactgcttatggaaaatttaaaacacatgtaaaagtaaaaatagtagtaaaatgagctgccgtgaaaccattgtcttgtttcaacaatgatcagtacatggccaatcttattttatttatattcccactctcactacctgaattatattaaataaattctagacattctgtcatttcatacgtaaatgtccctgtgtgtgtctttaaaagacagagactattaaacaaatataataccacaataccatcatcacatctaaaataaatgaacaataattttcttttttttttttttctgagacagagtctcactcacttgcccaggctggagtgcagtggtgtgatcccagctcactgcaatctctgcctgccgagttcaagcgattctcctgcctcagcctcccaagtggctgggattacaggcatgtgccatcacacccagctaatttttgtatttttagtagagatggggtttcaccacattggccaggcttgtctcgaactcctgaccataggtaatctgcccacctcagcctccctaagtactgggtttacaggtgtgagccactttattgtcataagaaattaagacaataatttcttaatgtcatcagacatcctatcaatgttcacattttctggactgtcttatacattttttaatagtttgtttgaattgagatttaaataagctccatatattgtgaaaccattgagttatgtttatatcattatgaattcatggatttaaacatatttgatgtgtttcaatccattccagttttatccttattgatactcatattgtctcatttttggtctgtaggaatttattcaaactggctctttggtgcagacagagtttgtatatttggcataatattagtactctttaaaagcttcctttctttctaatatgacaggctattgcaggtttgtcttgaacaattcctgccccagacctggaatcagccatttctccaaggagctctggttccttttagtggaaacaatgtttaaataccataatctaggaactagcagtgtttgggatagcagattgaccattgttgctaagccttttcagtagctagagctaagaaatatcttttttaaaaaaattaaataaatcacaagctgacactgatacttcaaattcaaattcaagactatagggtttactcaccccatcaatcttatatctgcacttcttttcaaacatgcttaaaaaatctgggttctctaaaatatcaactcaagtacttgtttaatttatcctgtaaaattgcagaataacaacaacaagcctacgccaataagattgttaatgaaaacaaattagaggttttaaagtggagggggacaggtttttctccattaagccaaatgtcgctaacgatgtaagtcaattactgtgttttgaagtcacctggaatagttccctgtatggttatgctccacctccatacacaggtttatttgtttcatttcacttcttccttttagggcttgctttttacacttatgtaatttcattttataattatgtaaaacatttatgtggatccaaagtgaaatcatcacaatgaggtatattcaaagaactctagcctctacttttgtctgttttacacgatttccttttttccttaattggtaatcatttaaaaaatttatggtttatcttcctatttttagaaatatgcaaatatgcctatatattaatattctttcatcttaagtgaacactaacatattacacatatttttctctatcttgtttttttcacttagcattttttttgttttagtcaatcacttaacattttattaagaaaaattattcaggcgaaagacattagcaggtgtcctttcagtgatgtgctgggtattatttagtggacctttacaggaattgtttgattctttttagagttaagttgtaaaaaactgataactatgcaaatgatccctatacatggcaatgcaaataaattttgtattgtagatttcactgaatagagaaatagagaatgtagatctctgtcagtcgaattcttttttttttttttttgagacacggccttacttcatcgcccacgctggagtgcagtggtgcgatctcagctcactctaacctccgcctcccggatttaagcgattctcctgcctcagcctccccagtagctgagattacaaatgcacaccaccacacccagctaatttttgcatttttagtagatacagggtttcaccgtgttggccaggccggtctcgaactcctgacctcaggtgatccacccacctcggcttcccagagtgctgggattacaggcatgagccaccatgcccggcctcaaattcttatttgaactgactttaatcttactgatcccttattaattaatgagttaaacttcgatgcgttcgttgtatatttgctctcagctttttagaaactatactttagcaattaaattctgataactccacagtagtatatacagtgttcatttatttttatggccacctagcatcttttgaacaatattcccatgtttggagaatttcccacgttataaattttgcttctccaagttgaagccaaagctccattttcaaggatccagtgcagttaaggcacagacatgagacctagcctttgccagtcaggcacacctgtatagaacatcattttgcaagtgggtaagtgaggaaccagaagtatgtaaaatcctccttttggtgagaatggcagtagagatgtctcccagcagcagcagcaccagcaggagcaggagcagcagcagatattctaatatctggtccccagtgtcacctgttcaaactgtagtgtttatgtcaaatattgtgtctgctcagtggcatcataggttgagcagtcctctctgtggttttggtgatgtttgtggttacacaataaacaaacctcaccgactttctggcctttcataggttctttgagtttccggcactttttttttttttttttgagatggagtttcactcttgttgtccaggatggagtgcaatggcatgatctcggctcactgcaacctccgcctcccgggttcaagcgattctcctgcctcagcctcccaagtagctgggattacaggcatgcgccaccacgccaggctaattttgtatttttagtagagacagggtttcgccacgttggccaggctggtttcaaacccctgacctcagatgatccgcccgccttggcctcccaaagtgctgagattacaggcgcaagccactgcgcctggctgcttcctgcacattttaaataaactgtagtacccggatagatgaacctagtattgacatccacagccgtgttgagtttggaaaaacaagggtggagtgtcagaagctagaatggggaaggtgcttttctcaggctgcgaatacaggaaactcaagaagaaagctattgtggagctctcaataatttcaggttgccttctctatccttctttacacatctgatctcatacctgatgttttttgcttttagccttgatacctctatatgtatttctatccatagaaatagacagttcaatttccttaatgagaaattagcataggaacaaatttctttccatcaagattaaatggtagacaactgcttttacaagggaccatgtatttttccagtcattgtttctctgtctgacgaggtctataaatctacactcagtacagagcataaacgtggtgattaggcaacagcacaccttctgtctccattcctgggtattgcctacatggaattgtgtatgaaattatgtctctacctgtttccggtaatcctctaccaagtgggaaaaaattttggggttaattgtgttttctagtggtactctaaaccggattcaggacggcagcggccatctaaatgtcttcctttgtttatttctaaatccataaattaattccagatttaccaagaaactaaattgagttgatcccaaaatgaaacagggctctcagggacatactcacttcttcccagcctgcctttggactcagtaagtaagcagagactgtgtttatttgtctgatatacatgacccctggttaatatgtaggtcgtagaagaaaccaaaattttacttatggaaggcagggagaatagagatgaattaccttttgtgagaaaaagaacaagtgacatattaactgctattgtattttctgttgtcaggacgtgggctgagtaaaaagcttaaaagcttttgcatatgtcttggttctgccatctattggttataaggcctggaacaagtgatttaacatgcccatggctcactttccctatgcataagtacggaaatgctgacttagtggcaactaaacagtggaagacaccagcaatagaatgtaattataatatcgctccatgagatggtaagattttacagttccaactaattattcctgagtccgttccttttgcagaacaagtttctaataaagtactcaggattaagatagatggttatgagcaagtgctaccatttaggatattcatttgaaatactaatgctcctggcattttttttttttttttttttttttgagacagagtctcgctctgtcacccaggctggagtgcagtggcgtgatctcagatcactgcaagctctgcctcctgggttcatgccattctcctgcctcagcctcccaagtagctgggactacaggcgcctgccacacgcctggctaattttttgtatttttagtagagacagggtttcaccatgttagccaggatggtctcgatctcctgacctcgtgatccgcccgcctcggcctcccaaagtgctgggattacaggcgtgagccaccgcgcccagccgcgctcctggcattttttatttttatttatttattttttttttttgagacagagccttgctctgtcgcctaggctggagtgcagtggcatgatcttggctcacagcaaactcttcctcctgggttcaagtgattctcagcttcctgagtagctgggattacaggcatgccaccatgcctggctagtttttgtatttttagtagagacggggtttcgccatgttggccaggctggtctcaaactcctgacctcgggtgatccacccacctcagcctcctaaagtgctgggattacaggcatgagccaccatgcctggccaagaaaaacatctttaatacaaaaacacagaaaggttgacaataataggaagctaaaagctagatcacacaaacgcaagcaacagcaaaatgtgggtataattattcaaatatcagtcagagtagactttaaagcaagaagcattatgaggctaaagagggaactttcataatgataaagaaataaatgataaagggacccgccaggaagagattataatcttaaatctgtatgctcctcaaaacatggcctcagagtcccataaagcaaagattgccagagctaaaaggaaaaatagataaaatctgcaatcataatgggaggctttgagatacctctttcaatagcttgtagaataagcaaatggaataaattaatagcgatatagaagattcgaataatgcgattaatgaacttgtcctaattaagatatctagagcctgtcctcaacaacagaatcctttttttttttttttctttttttttcacccaggctggagagcagaggcaggatcacggctcacggcagctttgaactgctgggcccaagtgatcctcccagctcagcctcccatgtagctgggaccccagccccaagccactgcactggcctcagaatatttattttgaagggcacatagaatatttaacaaaattgactctgtatgtgctgggccataaaatattcaagtcatttagagtatgttctctgaccacagtgagattaagctaggcccaataacaaaaatgtaattagaaaacctcccatttaagtgatatacttcttaataaccatggttattaagaagaagaaatcataatggcaattagaaaatattttgaactgagcaataatttttaaaaatgacatataaaaatgtgtgagatccagctaaaccagtgcttagaaagaaatttataactttttaatgcatatattagaaaagaagaggccggcgcggtggctcacgcctgtaatcctagcactttgggaggctgaggtgagcggatcacgaggtcaggagattaagaccatcctggctaacatggtgaaaccccgtctctactaaaaatacaaaaaaattagccgggcatggtagcgggtgcctgtagtcccagctactcgggaggctgaggcaggagaatggcgtgagcctgggaggcggagcttgcagtgagccgggatcgcaccactgcactccagcctgggcgcgagcgagactccgtctcaaaaaaaaaaaagaaaaagaaaagaagaatggctaagaatcagtggtctaagctgccacctcaagaagcaaagggaagaacatcagagatgttttgatgttctctatttcccgccctttttttttgtttgagatggagtctggctctgtcgcccaggctggagtgcagtggtgcaatcttggctcactgcaacctacatctcctgggttcaagtgattcttctgccttagcctcccaagtagctgagactacaggcgttcatcaccacacccagttaattttgtattttaagtagagatgggggggggagttctccatgttcatcaggctggtctcgaactcctgacctcagttaatccactcgccttggcctcccaaagtgctgggattacaggcgtgagccaccgcgcttggccatcttttggactaaataaagactgttgagctactctggcagtactctttttagaaaagcacttgcagcaaaattgtgctttcaataaatgatattaaattgtgcattttatctttgaactctcaaactctgttattctttttcaaaataggaagtttctagcaaatatggaaaagaggaaatacccaaatcgatatgttttaatgaattaaatacagatattatgcatcttctgtgccaggcattgtacagggcactgaagatctttcctgcccattattttatttgatcctcccaacaacatatgaggtggtagtggtagcaatagtatccctattctatagtttaggaaactgggacttagaaagccttgtctaaaaccattgtggaaataagtggtggaactgaaacttgaagtccacaccaacatccttgatgcctgggctagatattgtatttcataccaggctggagcagcggtgtctcagagctggcttgtattgacactcgttcacgaaagctgcttatacccacttcatcctcactccatctttagtagcattgcattggtagcttaaaataagcaaactctacaaatcaggtctcccttattttattttattttattttattttatttatttttttgagacagagtcttagtctatcacccaggctgaagtgcagtggcgtgatcttagctcactgcagcctccaccttccaagttcaagtgattctcctgcttcagccgcccaccaccatgcctggctaatttttttttttttttttttttttttttttttgagacagagtcttactctgtcacccaggctggagtgcagtggcgcgatctcagctcactgcaacctccatccccagggttcaatcaattctcctgcctcagcctcctgagtagctgggattacaggcatgcgacaccacacctggctaattttttgtatttttagtagagacagggtttcaccataatggccaggctggtctcaaactcctgacctcaggtaatccgccacctcagcctaccaaagtgctgggattacaagcgtgagccactgcgcccggcccgcgcccggctaatttttgtatttttttgtagagatgggctttcaccacatttgcccggctggtctccaccttcctgagttcaagtgatctgcctgcctcggcctcccaaagtgctaggtttacagatctgagccactgcgcccagcctatttattgttttaatctggagagccagttgttaaacacttactagcatgcaactgggctggactcagaaggcacggcatctgcttaagttccttttctttgaactttcttattttgttcaagacttggcattgtaagaagtcgcaatactggcttgaattactatagtttctcagtttcagattttacagaatggtaaaacttgaagaaaatattagagggccaacttaagggtttttttttagtttatcaaataagggtatttaaaatgtattatcttcactcatcatttcaaaattgaaggagcattttaacaccaaaaaaggataaaaaggaaataatctcagaatttagaagttgattatatttagttttgttaaaaactcactccagctgggtgtggtggctcatacctgtaatcccagcactttgggaggtcgaggcaggcagatcacttcaggccaggagttcaagaccagccttggcaagatggcgaaacctcgtctctaataaaaatacaaaaaattagctgggcatggtagtgtgtgcctgtaatcccagctactcgggaggctgaggtgggaggatcacctgagcactggaggtcaaggctgcagtgaaccatgatggcaccactgcactccactctgggtgacagtgagagagagaccctgtctcaaaccaacaaaacagaacaaaaaagtctcactccattgtctatattttaatcatttaactgaagactaatgaaaatattgtcaaggacaaatatcccacaaaacagggatttttgtttgttcagatgtatctcaagcacctagaacagtatctagcactcagtaaatattcgatgaaagaatgaaggatttgcaggaatctggtgaccaaagtttggcaaccagaggtgtaagctacccaacttggcatcttggctagtcagtcagctaacatatttgaagtatttaagaagatatgaaagaaaaaaatgcacaaatcctatcttaggttgagaaaatctagttgggagttatagaagatggatgcctaaacatggcttaatctcaaggacaactaatatcaaattagttgctctacttttaagagaactatgtagcgcctttattcaagatattagaaatgcctttgctagaaacgggagagtcttttcacggttcactaattttccctaggaatctgcagaaccaatgagaatgaaagcttttgaacgtacgatgatgaggcaggattctgaagcttctatttaactgtattgtcggggacattgaaaacatcaattgtaactgtaccaatgagatggtgttggtagcagcggtgtccctcttctatagatgaggaaactggaacttagggaggcttaagcaagatcattgtggaaggaagtggtggaagtgtgggcatagtgccacaaacattaaaaacaggaaaggtgagcacagaacaactttcctttaagtcatttctccttcttacatctacctggtaagtcagcccagccctttggtagaggcacctgttaccaatggcagcaataacagaagaggcagaggaagtgaagatacctaaggtggtgctaaggctaaagatgaatgacagttgcttcattttatttgtaaagtgcaagtgcaggccagtaatagccttctttaaccagtgtattttaagtcctatacatacaagcagtttccaacttgcaaaagtgttgtgttttaaaagacatgtaaagaggctgtttaaaaccaaaaatagaggccgggagcagtgcctcatgcctgtaatgccagcactttgggaggctgaggtgggtggatcacctgaggtcaggagttcaagaccagtctggccaacatggtgaaactaaaaatacaaaaatcagccgggtgtggtggtgcatgcctgtaatcccagctactcgggaggctgaggcaagagaatcacttgaacctgggaggcagaggttgcagtgagccgagatggcgccactgcactccggcctgggcgacagagattctgtctcaaaaacaaacaaaaaaaaaaacaaaaatatactctccttaagaagtattataaagtggttatttgtttcttaaacatgtcaataaaaattcatatgatttagtccataatgtagctgaaaaattatgtgtacacaatggaaaacagtactagaaatactgctgtaaacataatagacttgacctcaattagacttgttccagcagctcctgagactgggcttctattgaatgagcctgaatttcattcccactgattcaacagtggtagccaactctcatgtagcagacattctgactctggccaggcactgctctaagcactttacatatattgactcatttcatcaccacaaaaatcctgcgaggtaggtattattcttttctctattttacaaaagccctaaccctagcccaagatcaccttgctagtaaatggaagaggcagaatcaggatccaggctgcctggcaccagagttcatgctcttaaccactatgttatgttgcctttcactaaaatataattggcttctttcatatcaacctttaattcaatagagaggaaagggaaagtaattcctgagggtgttggtatggcaggcaatcatgcaattctatagagtagatactcagaatttttttttattgaatgcaagtgataaattattattgctttgagtgatgggggtcttacaaattaatttttgtacatttatgatagctagagtaagaaggtattcaatagaaagacacatggtatccagaagcaggtatgaaaacaataaaataaaataaagatgcagatggaattttctactgaggctaggaagatgctagcctttctctggttacttaaatattccatcattacacttcaaaccgcaatgccatgtaaggtttcaatctgtcccagtaagtccttgctactttgttaagtctctgagggcttcaagtagatacttttgatgtattttccagcttttctatttgccctcagtgggaaggctggactgaattatgtagttcactatgctggaagggcaagtccctgagtccctgattcatgattttaccatcctccacaacctctgaaacagcgccgtccaacagaaatgcagtgtaaggcacacagtaaatctaagttctctggtggccatatttaaaaagtaaaacacgggccaggcacggtggctcacgcctgtaataccagcactttgagaggctgaggcgggcggatcacctgaggtcaggagtttgagaccggcctggacaaaatggtgaaaccctgcctttactaaaaatacaaaaattagccgggcatggtggtgggcacctgtaatcccagctactcaggaggtgaggcatgagaatcatttgaacccaggaggcagaggttgcagtgagccgagatcacgccactgcactccagcctgggcaacagagcaagactccatctgaaaaaaaaaaaaggaaaacaaaacaaaaaagcgagataacattaattttaagccacattttaggccaggcgcagtggctcacgcctgtaatcccagcactttgggaggccaaggcaggcagatcacggatcacgaggtcaggagttcgagaccagcctggccaatatggtgaaaccccgtctctattaaatatatatataaattagctgggcacggtggtgcgcacctgttgtcccagctacttgggaggctgaggcagaagaatcgcttgaatccaggaggcggaggttgcagtaagccaagatcgcaccactgcactccagcctgggggatagagcaagactctgtctcaaaaggaaaaaaaaaagaagaaaaaagaaaaacacattttatttaactcaatgataatatccataacattatcctttctatttataatcaataaattattaatgagatatttttggtatcatcttcaaaattcagttttggagagcaccgttgtcagttggtccaagtgtccaggtctgaggcatccgcccaaaccctcccacttctggcccctcaaactggaagaacattcatcatgcattttgtgtccaaggctcaaaagtttgttacccaagatgatgagtgctgacatggatgcagttgatgctgaaaatcaggtggaactagaggaaaacaacacgacttattaatcaagtgtggaaattccaactcatacttgaagatctctctgcaagagcaaacacaggtaaggaagaaaatctgaagctaaaatcagaaaaccaagttgttggacaacatatagaaaatctcatgtcagcttctggtgtttttcaaacaactgacaccgaaagcaaaagaaagtaaggaattgacacacttctgttttacagaattgctgctgataattttttcttttaaacttggacagattccaaaaagttacagcatctttgtggcttcattgaatatttatgaagaaaatgtcaggtgaggcaaaattaacagcattaacaggagacttccctaagtttgtatattatattagtctatgaaaacatgcagtctctccctctccctccccctccccctccctctccccacggtctccctctctttccacggtctccctctcatgcggagccgaagctggactgtactgctgccatctcggctcactgcaacctccctgcctgattctcctgcctcagcctgccgagtgcctgcgattgcaggcacgcgccgccacgcctgactggttttggtggagacggggtttcgctgtgttggccgggccagtctccagcccctaaccgcaagtgatccgccagcctcggcctcccgaggtgccgggattgcagacggagtctcgttcactcagtgctcaatggtgcccaggctgaagtgcagtggtgtgatctcggctcgctacaacctccacctcccagccgcctgccttggcctcccaaagtgccgagattgcagcctctgcccggccgccaccctgtctgggaagtgaggagtgtctctgcctggccgcccatcgtctgggatgtgaggagcccctctgcctggctgcccagtctggaaagtgaggagcgtctccgcccggccgccatcccatctaggaagtgaggagcgcctcttcccggccgccatcccatctaggaagtgaggagcgcctcttcccggccgccatcccatctaggaagtgaggagcgcctcttcccggccgccatcccatctaggaagtgaggagcgcctcttcccggccgccatcacatctaggaagtgaggagcgtctctgcccggccgcccatcgtctgagatgtggggagcgcctctgccccgccgccccatctgggatgtgaggagcgcctctgcccggccgagaccccctctgggaggtgaggagcgtctctgcccggccgccacgtctgagaagtgaggagcccctccgcccggcagccgccccgtctgagaagtgaggagcctctccgcccggcagccaccccatctgggaagtgaggagcgtctccgcccggcagccaccccgtccgggagggaggtgggaggtcagccccctgcccggccagccgccccgtccgggagggaggtgggggggtcagccccccgcccggccagccgccccgtccgggaggtgaggggcgcctctgcccggccgcccctactgggaagtgaggagcccctctgcccggccaccaccctgtctgggaggtgtgcccaaccgctcattgagaacaggccaggatgacaatggcggctttgtggaatagaaaggtgggaaaggtggggaaaagattgagaaatcggatggttgccgtgtctgtgtagaaagaagtagacatgggagacttttcattttgttctgtactaagaaaaattcttctgccttgggatcctgttgatctgtgaccttacccccaaccctgtgctctctgaaacatgtgctgtgtccactcagggttaaatggattaagggcggtgcaagatgtgctttgttaaacagatgcttgaaggcagcatgctcgttaagagtcatcaccactccctaatctcaagtacccagggacacaaacactgcggaaggccgcagggtcctctgcctaggaaaaccagagacctttgttcacttgtttatctgctgaccttccctccactattgtcccatgaccctgccaaatccccctctgtgagaaacacccaagaattatcaataaaaaaataaattaaaaaaaaaaaaaaggaaaacatgcaaatgaattgtagaaactttatcattacagttgcacatattggccaggtgcagtggcacatgcctgtaatcccagaactttgggaggcggaggcatgtggattgcctgaggtcaggagttcgagaccagcctggcaacatggtgaaaccccattcctactaaaaatacaaaataattagccaggcgtggtggcttatgcctgtaatcccagctattcggcaggccgaggcaggggaattgcttgaacctgggaggtggaggctgcagtgagctgaggttgctccgttgcactccagccttggtgacagagcgagactgcatttaaaaaaaaagaattgcatatatttatgaaacttaaagatgaatgttttatcaaattttccttgatttgtagatttagcactgtcttttattagaggcttactaagatatacaagaaaaataaccacacgttgtgaaaaagtgaccggaatcatacactgaatgcgtagcctcatgtaccctgtccgtcatcttatgcctcttctccacttgcctcttcctctttaccttcctcgaaggaaagaattggtttcacatttgtaaaagtcattttaatagttaatcatctcagagagtaacctgcactttaattgttgaaacttaaccaaaataagatacagaaagtatctgtatctgagaaacagctagggcttgtcattttttatatttagtattaagacaagaatgctggtttctctttaatccatttaaaacagagggaagctataaaaataaagatttttctttgaggctgaattgtcaacttaggaagatttgttgttaaaaatttgtttttgcacaaagtaactcacttcatcttatctggaaagataagttggtcaagtgtatgtttaaaatacaaaatttagaggaaaaatagaaatagggtgaaaaagtacttggtaaacagtagtgacgaactgtgaatattttcactccagattttgttatccctggcacagagtagatcttttgggaaatatatacggaagtggattaagtttgactaactttatgtaagccacatctagaagagaacagttacaaagagtttggtctctagatttatttgtacccagcagatcaacttttgcaaaattccttcgcagtgcagtagtattagaattgtgaatgaaataggagtgtttcgcatatatgcttattgacaatcttctcagtattttatcttacttgttctctcagaattttctgtcaactcaactacttgatttgcagtcatcctttgttattatcctttaacaagttttatcttattttatttattttttgagacagggtcttcctctgtcatccaggctggagtgtagtggcacaatctcggctcactgcaacctctgcctcccaagatcaagcaattctcccacctcagcttcccaagtagctgggactaaaggcacgtgccatcacacctggttaatttttttattttctgtagcgacggggtttcatcatgtggccgaggctggtctcaaactcctagactcaagcgatctgcccaccatggcctcccaaagtgctgggattacaggcatgagccaccacgcccagcctggcctcaaattttaaaaatttataggttccatttggtaaagaaatcagtatcagaagtaatgctaaaatcttataataggaaaagagatccactaatatagcctatggttattagatttgggctacttttaatcatggaataatcttatgtattggtgtaagagttgatgaatgactttacctgtatgaattagaatattcaaactgcaaacattttgcatcccttttgtgacctaatttacagacatttaaattgtgctgcaattctgctttgccatttaataaaaagctgtttcagaaaaaaaaatccagttttgtattttatacttacagcacatctcaatttgaacttttcagtgtcacatctcaagtgctcaatagcttcttgcagttaatggctactgcattcgaccacacaggtctaagccctcatcgcttttccaaaagcagagttctgatcaaaagatttcctgttttgaccaggtgcagtggctcgcgcctgtaatcccagcactttgggaggctgaggcgggaggattgcttgagcccaggagttcatgaccagcctgggtaacatggcaaggtcccatctctacaaaaaatacaaaatttagctgggtgtggtggcatgcgcctgtggtcccagctactctggaggctgaggtaggaggattgtttgagcccaggaagtcaaagctgcagtgagtcgtgatcatgtcactgcactccagcctgggtgatagaatgagactccatctcaaaagatatagatagagatagatagatagagatatagataaatatagatatagatatggaataatatttttaaaatatattattatataattatagatctatttcctgtttcagcactgtggctcacacctttaatcccagcattttgggaagccaagggagggaggatcccttgaagccaggagttctcaagaccagcctgggcaacatagtgagaccctgtctctgcaaaaaataaaagccagacacagtgtacacccctgtagtcccagctacttgagaagctgaggcaggaggatcccttgagcgcaggaggttgccactgcactccagcctgggtgacagactaagaccttccttctaaaaaaataaaaacaaacaaaaatattttctgtgtcaaaactcttcaatacttccatattgcctactaatttgaaccaaagtccttattccagtatttcagatgctgtacaaaacaaaagcattgctctatctttgcagtttcatctttgctatcctcacacaagaaccttatactctaagcaactagttttcctcatatttccagatcatctatgcttgtcaccctctgcactgttgacttgcttaatgatcctaatagtcctagctaacattaattggatgccaattatatgccaatgagtgtgctagactctttgtgcattattatttaatcttcacaactctatgaggtagatattattatcctcattttacagaggagaagttaaacttctgagaggctaacttgttcaagaggacaaaactgtccattgacctagaagtgaaccaaccttgtttttaaagtagtgctttcccaaaattatcgtgttgcctctctctttctggaatttccttttctcatttctgctgcttgaaattctgctcctccttaatggcccatctctgaaaatagctcttacaaaaagcctttctcggccaggtgcagtggctcacgcctgtaatccgagcactttgggaggccgaggcgggtggatcacctgaggtcaggagttcaagaccagcctgaccaacacggcgaaaccctgtctctactaaaaatacaaaattagccgggtgtggtggcgcatgcctgtagtcccacctactcaggaggctgaggtgggagaattgcttgaacccgggagtcggaggttgcagtgagccgagatcgcacattgcactccagcctgggcaacaagagtgaaactccgtctcaaaaaaaaaaaaaagcctttctttatccccaactggatgtcactttttgagcttctaccaagctttgaggctttgaggctccttgtggcagacacatagactgagcgcagaaaaaccatcctcttaattttctgtttaatatgataattatttgtatttttgccttatgtaactacctgttagcccataaagtacaggggccctgtagctcctactcttcttcgtgtcctccacagtatatgatgcgatggtcagcagacactaaataaatattttctgatgatttaaattatttcagcaccttcattccagtctgttgtggaatctcatcctgcacatcactgccaaactgtgctcctaaaacacatttttatcatgctgttttctagaaatgttttctgttgcctgctgcatgaagtcctgcgcccctgccttccaaggctctttccccatgctctggatccctttcctgagcattttactcaatttgtttttgtttttgttttaaagagggggtctcgctctgttgcccaggctggagtgcagtggcgcgatctcggctcactgcaaactctgcctccctggttcaagcaattctctgcctcagcctcccgagtagctgggattacaggcacacgcctccatgccaattttttgtagtttagtggagatggggtttcaccgtgttgcccaggctggtgttgaactcctgagctcaggcaatctgatggctcatgcctgtaatcccagcactttgggaggccgaggctggtggatcacttgaggccaggagtttgagaccagtctggccaacatggtgaaaccacgtttctactaaaaatataaaaattagtgcctcatctgtagtcccagctacttgggaggctgaggcacgagaatcacttgaatccagcaggcggagattgcagtgagctgagatcgcaccattgcactacagcctgggtgacagaacaagactagtctcaaacaacaacaacaacaacaaaaacaaacaaacaaaaccccagattttgaaaactcagcctctgatgtagccatgctggtcccatggacctccccagttgcccaatcattcttgcctcctttctagaatggctctctccattccttggcctctttgttctgcaagatccacttcaagtactgcctcctcagagccttctctaactaccccaactcttcttccctctagctacacttgcacgatacaaattgtaccacgaaattctgattctgtatttgtagcacgtaagatagttttatctcactagctaacttgaaaatacaggatcttgtcctactcatctttgtattgcactgtggcttaacacatatttagataataatcaataaacattcattgaattaacttttcctaattataatattctacatggtttgtcttcatttctggttcatcatgacttggcagtggcttctgaggctttaagccttaggtttctctttgaatctcctcctggtatgcaaaagtctgtaaacacatacagtgtttgaatacattaggggaacatgtcattagataatctatccttgtatcacttaaggtattttataaacttacacatcatcctgtgacattccaaagctgtaaactggatttttgcaaagctgtaaattgccctgaaatggggcacactttttgcaaatttatttcaatagcgattgaaaacaaaaaaacaaggcaaatgttttgcacaacagttgcacaacaactaagtcttatccagaatgctgcacaacactaagtcttatcgggaatgcagactccctttcatcacaaacgaggcaacatctcctgaataacgtggaaaaggagaaatgaaagcaaaataaggaagctttgtccctgcttgttacagttgtaccttttcaagcttttgaagtaaccatctcttagcttcatgccccctgaaaatcagctgctttaagtttctctgtcttatttagtctgtgtgtgtgtgtgtgtgtgagagagagagagagagagacagtcttgctctgtcgcccaggctggagtgcagtggtgcaatctcggctcactgcaacctccacctccacgttcaagcaattctcctgcctcagcctcctgagtagctgggattacaggcgcgccatcacgcctggctaatttttgttttttgtttttttttgtaatagagacagggttttgctatattggccaggctggtcttgaactcctgacctcaggcgatctacctgcctcagcctcccaaagtgctgggattacaggcgtgagccactgcgccctacccttatttagtcttaaagaaaaggattttgaattttaggatgattcattccaatgctagttctagtctctgttaatttacccaagtgtgctaggaatttaataacatacattattttcataataaaatagtttacttcttactgacctcactgtccaagaaatgcacaaaggtgaggtgaggaatacccttcatggactataggagaatatgggactagaaaagacgattttaccataatgttgagtttcccctcaattaactttatgttaatattatgcaataactttctgaagaaagaaaacagaattcttgagtcattagggaaaataggaatgttctgaattgaaaatatatattctttctgatattctgtgtagcttatctgcttggtgcattatttgatcctagtagacatcccccattatcctacaagtactccttgtcacctagcaatgtgtactcaaagaaggagcttaattttaccaagagaacaaaataagacataattagggagtactctagaagccagtgataagacccctcccctaacaaatgaataacaattggtgtgacacatttgatgtgttacaattaattacaaagtaagtcacaagaaatgtattactaataaaaaagtaccaacagtttgaaagtgacatgtttaacaattagagccaattcagcagattatccctataataatattatgttgatagatgtgcattccagtatgctttctgggagagagaaggggagaattatgggtagctaccaacgactgatattattttgtgagcgtgtccgtggaaatgtgtcgaaaatgtgaacaacatctgtcttctctatagtaatatgggaaagttgagaatagctaagctaaaaggtgttggaagtatactttttttcaccagcttcccttcctccttctcgtggtaacagcaccctgattttaaaatggggaaaccctgacactcctgggcttaagatagaaccaatcttgcccctagcttcaagagtgggcataggtcccaaggccagcctgtcaaagttttgtatccctccagctacaatgactggttggggaatgagcatgtgacacaatcacagcctgcaagacctgtatcacgaggttctttgttgcaaagaagagtagtcgattttggctgactcagaatttggtagaagttacaaactgtaaaatgtggaactggctgaatggagggcgtggggatagggcaatgaggactctagtccaaactggaaattatgaattcatgaaatatctgttgcctattgttttggggtaagaccacaggcccactggagtgtggtatgagaagaaatggtagtgctgggcgcagtggctctcccctgtagtcccagcactttgggagatagacaggtggattgcttgagcctaggatttagagaccagcctgagcaacatggcaaaacccttctctacaaaatacatgctgggtgtggtgacacacacctgtagtcccagctacccgggaggctgagatgggaggatcacttgagtgcaggaggtcgaggctgcagtgagccatgattgtgccactgcactcaagcctgggcaacagagtgaggccctgtctcaaaaaaaaaagaagagaaagaaatgataggaaaaattcagcatgttggcatatgttggctccttttgtaggcttcagaaagtggctcacgtctgtaatcccagcactttgggaggtcgaggtgtgtggatcacgtgaggtcaggtgttcgagaccagcctggacaagacggtgaaaccccgtctctactaaaaatacaaaaattagctgggtgtggtggcgggcgcctataatcccagctactcaggaggctgaggcaggagaattgcttgaacccgggaggcagaggttgcagtgtgccaagatcacaccactgtactccagtctgggcgacagagcaagacttgtctcaaaaaaaagcaaaaagcaaaacaaaacaaaaaacaagaaagaatacaagaaagttactcagtaacttaatctgaaagtgttctatctaaaagcgtagagagaataatatatcgctttgctaagtgaagttctttctgcctatagcctgcaatataaaatcccatagtttagagccctatagggtagaaaaagtaccaaactggtcgggcgaggtggcttacacctgtaatctcagcactttgggaggctgaggtgggcggatcacttgagatcaggaatttgagaccagcctcgccaatatggcaaaaccccatctctactaaaaatacaaaagttagccgggtgtggtggtgggagtctgtaattccagctactctgaggcaggagaatcgcttgaacccaggaggcagaggctgcagtgagccaagattgtaccactgcactccagcctgggcaacagagcaagactccatctcaaaaaaaataaataaaaagcaccaaactaaacttaatgcagaggcaaggaggcaaaagatttagcaagaaataagaccagagttccaggcttctgtcatgcacctccagctaagcattttcccagaaaagagggcaaagctcagattatgggtatacatctgctcttatggcttttattttgagctacttggacaagtaccattaaatggaggtcaggggatggcacagcactgaggttgattcctaggagtttgaaattctcaggtttaaacattttatctagaaaaacattttttgggtgtgacaactcagaccaaaagctactgagcttttatgggaacgtattgccaaagaaaccccaggcccagcaatctattgtattttctaggtttccaatttgtaccacagctaaagttgagtagggcatgcccagaaagggcatttccatgtgcccatctctggcatagccatggagaataagagacaagtaagatcctctagcaggaagaagcaggagccatgctagaccataaagaagatccccatagagagcgagcctcgagtttcccagttacctcgccaaggaactcattctactgccaggcaaggagtcttccatattcctgcctagcaggacataaattatgctacagatcaacaataactgtgtgctatttttcatccattctcctctttgcagaattagagttttcattgtaattactctgttcctattttttttaaagatatattggctaagatagtttaagttttacccagtataagcgaatctggccacttctctctccctctaccatgaccacagtttaagttcccaccatttccccactagacttacgtaacagccctctaacttccctacttccacgctacactccgccctacagtctattcttccctgtaccccagttcacatcactcccctgtacaaaactttcccatttaacaaatattaagcatctgcttgccaggcctcaaggagccatatccaaatttgagaaggaaatcagaaagaaatcatcagccagaaatcctggtcttaagagttgaacactgtaaccaaataaggccctgggttgtctctcaccggggaagaggagttgataagcactctgttatacaggcatgagcatttcttgaataactccttatttctaacagcattctaattttgtttagataaccattgtccgtaacaccacagactgaaatgaagtcagacaggtggcctgggccgggcgcagtggcttacactggttaatcctagcactttgggaggctgaagcaggtggattactggagtctaggagttcgagaccagcctgggcaacatggcaaaacctcatctttacaaaaaatacaaaaattagtggggcatggtgacatgtgcctgtagtcccagttactcgggaggctgaggtgggaggatcgcttgagctcgggaggtcgatgctgcagtgagatgtcattgtgccactgcactccaatccgggtgacagagtgagaccctgtctcaaaaaaaaataaattaattaataaattaaggccgggcgcggtggctcacgcctgtaatcccagcactttgggaggccgaggcgggtggatcatgaggtcaggagatcgagaccatcctggctaacaaggtgaaaccccgtctctactaaaaatacaaaaaattagccgggcacggtggcgggcgcctgtagtcccagctactcgggaggctgaggcaggagaatggcgtgaacccgggaagcggagcttgcagtgagccaagattgcgccactgcagtccgcagtccggcctgggcgacagagcgagactccgtctcaaaaaaaaaaaaaaattaataaataaataaattaattaattaattaaaaaaaaaaaaaaggccgggcctggtggctcacgcctgtaatcccagcactttgggaggccaagacgggtgatcacttgaggtcaggagttggagaccagcctggccaacatggtgaaaccctgtctctactaaaaataccaaaaattagccgggcaaggtggcaggcacctgtaatcccagctactcaggaggctgagacaggagaatcgcttgaacatgggaggcacacgttgcagtgagctgagatcatgccattgcattccagcctggacaacaagagcaaaactccatctcaaaaaacaaacaaacaaaaaaaacagcctgggaccagatcatgctgcttgtaggccacttaatacttctgtattatattctaagttcactaaaatataaacccaatgaggtcttgaatttttgtcactgttgaattaccagaacagtgcctgactcacagtaaaggcttaatatttgttaaataaatgaaagagtaatgggaaagttttgtacagggaaaaacagactgtagggtggagtgtagtgcagaagtagggaagttagaggactatcacataagactagggggaaacaaagggaacttaaactgtgtggtcatgctagagggagagagaaacggccagattcatattatattttgaagaggcagggacagaatttgctaatatggaccaaaagagaagtagagaagaataacaacaaaatgattgagcaatatttaatttggaatcacatggctaaataatatatatatatatattttttttttgagatggagtctcactctgtctcccaggctggagtgcagtggcgcgatcgcagctcactgcaacctctgcctccagggttcaagcgattcttgtgcctcagcctcccaagtagccgggattacaggcatgagccactgcgcccagctaatttttgtatttttagtagagacagggtttcaccttgctggccaggctggtctcgaactcctggcctcaagtgatccacccacctcagcctcccaaaatgctgggattacaggcttgaggcactgtgcccggcctctttctttcttctctctttctcttttacctgagatggggtctcactatgttgcccaggctggattcaaacttctgggctcaagcaatcctcctacctcagcctccctagtagctgggactatgcaggcatgccaccgtcccaaccagaattttatttctttttatggctgaataatattccattgtgtagaatattaccacattaggctatccattcatctgttaatggacactgggttgtttctacctttgggcttttgtgaataatgctgctaagaacattggtgtatgagtatctgaatccctgcattcaattattttggatctaaatccaggagtggaattgctggattatatggtaattctatgtttaagtttttgtggaaccaacacactgttttccactgcagctgcacccttttacattcccactaacaacgtacgagatttcagtttcttcacatcctcatcaacacttgttatattccaggtttgttgttgttgttgttgttgtaatagccattctaatgggtatgaagtgtatctcactgtggttttggtttacatttccttataggctagtgatgttgagcatattttcatgtgcttattcaccatttgtatatctgttttggtgaaatatgtattcaagtcctttgcccatttttaatttttcttattgtagagttgtgggagttctttgaatattttggatattaattctttcatcagatatataacttgtggatatcttctcccattctgtgttgtctttaccctctcttaatagtgtcctttggtggacaaaaaaattctaattttgacagaagtccaatttatctaacttttttcttttttttttcttgagacagagtctcactctgtcatccaggctggagtgcagtggcatgatctcagctccctgcaacctccgcctcacagggtcaagtgattctcctgcctcagcctcccaagtagctgggattacaggggcccgccaccacgcccggctaatttttgtattttagtaaagacagggtttcaccatgttggccaggctggtctcaaactcctgacctcaggcaatccgcctgcctcagcctctcagagtgttgggattacaggcgtgagctaaggcgcccggccctaattttttgttgttctttcttgtgctgtggtgtcataaccactgcctaattcaaggtcaggaagatttacccctgtgttttctaagagttttagctcttacctttaggtttttagccattttgaattaattttttatatgaggtggagtagtgttccaacttcattcttctccatgttgttattcagttgtccagcatgactttttgaaaagactattctttcccaccttgaattgtcttggcaccccatgtcaattgaatgtggtttatttctacacccttaattctattccattgatctgtatgccttgactactattggtttgaagttaagttttgaaattgagaagtgcaagtcctccaactttgttctttttcaaggttgttttggctattctgaagcccttgaatgtccatatgaatcttagagccagcttgccaatttctgcaagaaagccagctgagattttaatacaaattgtgttaattctgtagatcaatttggagattattgccatattaacaacagtgtcatgctgggtgcagtggcccacacctataattccagcactttgggaggccgaggcggccaacatagggagacaagctggtctcaaactgctgggctcaggcgatcctctcacctcggcctcccacaaaataatttttaaaaaatcagctaagcatggtggtgttcaccgtagtccaagctacttaggagactgaggtgggaagaactcttgagcccaggagatcaaggctgcagtgagctatgagtgccactgactccagcctgggcaacagagggagaccctgacgaaagagagagaaagacagagcgagagagagagaaaagaaaaaataaccttaaaatgtttttcaagacccaagtttccatgtcacttaatttagtctcccctcaggcagattaaacactgagatctccttatatccacttaatcccagaaatgtagtacagttcttggcacagagtaagaactcaatatatattggctgaaggaatgaacaaataaatgaattgggatgaaatgtttatgtgacagtctctacaaccagactgtgagcgcatcaagtacatagaagatgttctattcatcttttttcctccagcacctaacacagtatccaacacaaaatgaatgtgtactagatgctatttattaaactgtagacaggagataaatactttatttcaaaagtgcaaagaagggaagacaaatcacatttctttttatcatgtaaacttgtaccaaagacttatgaatagatttatgaattggagtagaaaacatagacatttctaccttgaggatatagaagggaacttaggaagtgagaagtcagattaccctagtcctctagggtgcttaaagctaactagtcccgtgaatgagaatctaacctatgtgaaaatctccagcctgtacctgtacagcatcagccctgggacaacacagtcaggggcaggctgtagtcacatctcttagcctaagagtacacagctgtcagggaaagtcctgatggccacagtgaaaaaggtcatgggtggagagaagcaaagtaggaaggatcatttgaagcacaaacaaatggggaaactgaacagacaatctcagtatcaccacatctgcttcaaaaatagcacaccaactcccttccaaagtgcatcgttacactgcaccatcgtggaagaaatggaagagcaggatggatttggctggctggagtcacatcttggggaagctggccaggttggcaatgccacaggcgttgttcttatttcgagccatgaggatatatcctttgtttccccagttttctccccagctgtaagaccaatcaagaaaaatacttagtactctcagtttatttattcattaaaatatttactgagtattgtgcgaggtactgatggtacacaaaaatgaatatgatgttttttaactttaaagagtttaaagtcaagaaatagggagaaggcataatactgtaggtatcaaaggagggaaagattccttctgatcaagagaatcttagaggcttgatgtaagaggtggcatttgagctgagccaaaaggctaagtagaatttcgacctgtgggaaggggatgccagtggaagggtgtgaaatgaacaacagaggcaggaaagtgtggggcactgttaggatcatgtagctgaaaagcagtgtgcctaacagggtgtagtgggagagatgtctggaaaggcagattgagatcaggttgaattacctttactgcaaggttaaaaagcttcacctttactctgtgacccatcatcgtgaggagccagtgagggattttgagtgggagagtgatatgatcagagctgtatttggggaatattaatcttgaaaatgtgagtttagagcataagaaagaggctgaagctggtgatcttgatttgggagtaaaccccataggagagatggatgaaactatgagagtggatgagattactaaggaaatgagtagcgagactagaagacaagagagacgacgtgagaaagaggagagaggagagattgtctgtttatcttcctgaattgttttcagtcctctttccccaaccagcaacttctctaattacccaacacattttatttaaaacctgtaccctcccccactctccccttctccaggggcccccagtgttcctgatcctgcccgggtgtgtcctttcttcctcccagctctcttggaagctatctccacacatggtacctgatcatgaaagaacagggtaagtgcttggacctgggagtcaagagaagggacaacacaggacagaagctgtgggagacttgggaagatgctcaggttcaccttgagttggaactgtgatataaaaagttgcttcaggtttgaacaacaccactgcgtgagtctgtcagcgacccagagtctagggctcctgctccttggagggcactaaggacaggagatttagccagtgctgctgccaggttaatggtgatcagccaggaaaggaaaactataattgttatcaatctgcccctccccaaaagtcacaaggtgctaaagagaaatgggaagcaaggtaccctggagttttctttgttccccaacataggaaagtaaacactaactttttttgtttatatcttatttctaaaaaatgtttctcttcacaatctttggcaagttcttatatacgtgtatcttaagtgtattttgaaggaaaaaaactgttcaaaggaatattaaacctttacgctgttcccctactgttaaagacagattgctaatggaaaccatctaagaaactgatcacattagagacaaaagaaagtaaaaatacgtaattccaaagctcctgctggttctttgtactgctttatctcatggttagttaggtctgtcttattgggctctgagctcactgaaggtgtcatctgctcgttggtttatgtatgtcactaagcaccttgcacacagggagcatctgcccagcacataattgagcactattgtctggcggatatggtttggatgtgtgtcccctcccagtctcatgctgaaatgtgatccccaatgtgggaggtggggcatagtgggaggtgtttgggttatgagagtggattcctcatgaatggcttggtgccatcgccttggtgatgagtgagttctcactctattagttcatgcaagagctggttctttaaagagtcggcacctccctctctctcttgctccctctctcactatgtgacatgcctgctccctcttttgccttctgccatgagtaaaagctctgaggcctcatcagaggctgagcagatactagtgccacgctttgtatagccaaacaaacctcgtttctttataaattacccagtctcgggtattcttttgtggcaatgcaaaatggactaacacactggccattaagtgtcagactgagaattaagagcctctgactgagaagatagaagtgagaactctgagataattttttcttgatttgggacagagaaaggaatatcgggaagctggaggtgaggttgagtgttaaaagggtgactgaataacaaaagtagtgttcccatcattacctgtttttaattatccagtgcttgtttcccttctggattccatatcccactgccaaaactgcatggttcagattatcgctattgcagctttcatcataatacacacctagaatacaaactaccagcgtgaggctctatgcaatccaagggtcaccctgtgggatctcccagtctaggagactgtttgaagaattccatccgtgtcaggagggtttaccacagagatgctgctccatactgcagcagttgttaatttctctctggccacctccatgtgaatacaaaaactaagtactgaaaatacccaaggtccttcgagaaaccatcaagtttgtatcataaaagacagtgctgtataggatcagcagcttcttacctttgctgtaaaactggaaggaggtcaggcttgcatcaatggccacagagacaggtcccactcgggccactgccctcttcagggctttctcattcccctcggggatctctctgtaccctctgcatttagctgccttgcctgttgggttgtacatacaactctcttcctggaagaaacaagattgtaataggactaggacaaagcaataggcaatgagtcagtgagtaagaaactcaaccaatattttgagtgatgccagtgaactaacagaggcagcagtctagggtttctagagagggtctgttcttcctcagaaaaacgaatatgaaaagaggattcccgccttccaccacacataaaaaccaactacaggccaggtgcggtggctcatgcctgtaatcccagcactttgggaggctgaggagggtggatcacgaggtcaggagatcgagaccatcctggctaacacagtgaaaccctgtctctactaaaaatgcaaaaaaattagccaggcgtggtagcgggcgcctgtagtcccagctactggggaggctgaggcaggagaatggcgtgaacctgggaggcagaccttgtagtgagccaagatcgcgccattgcactccagcctgggcgagagcgagactccatctcaaaaaaaaaaaaaatcaactacaggtgttttaagacataaatgtgggaggaaaacagtagggaaagatttctgaaataagatttttttaaaaagcataaaccatcttctggccacatagtatgtattagcctcagggggcaggaaggcaccagctgctgtgtgggtaggaggccaaggccaaggcttagctagagggaagacctgggccctctgcacctatatcaggggaactggtgtgatccttgtgctctcatcaaagacaaaatataaaagtacataacaagacactaaaatagattaaagaacttagcaatttagcctatgacttccaacactatattttacaggtagttagcaatgtttcattggcaagccacaattatggaatcgaataatagcccatgttaaggtggtgtattcttttcagcaattcattttcctacagactaccccttcagaaccctaaggttgcatccacaagaacttattatctactactcagcaggctgaggcaggaggattgtttgtgcccaggagtttgagcctttagtgtactgtgatcatgctgtgaatagccactctactccagcctgtgcaagatagtgagataccctctaaaaaaatacattatctaacattatctaaatattaacagcaatagcagcatttgatatgccattttaagattacagtggtctactgccttgatatttttcaagatgcctttgtttctgccatgtgctccaaatccctgatgcctcctggtgccaaaaattacacagaattacaagtgaaacagaatatcttggaaattgactcaaaaagatattatgtgatgatactttaaagtcagaataacctgcattatgctggaacaaacttataataccatccctttaaaatgttatctggccgccctatcagatctcttcttttttatctttttattttttgagacagagtctctgttacccaggctggagtgcaatggcatgatcttggctcactgcaacctctgcctcctgagttcgagcaattctcctgcctcagcctgctgggattacaagcgtgcgcaatcacacctggctaatttttgtatttttagtagagatggggtttcaccatgttatcccagctggtctcaaactcctgacctcaagt

SEQ ID NO: 680 - DNA, 3865 bp, Homo sapiens; identical to SEQ ID NO: 52

SEQ ID NO: 681 - DNA, 4205 bp, Homo sapiens
cttgggttgcttccaccttttggctcttgtaaataatgctgctatgaacatgaatgtacaaacatctgtttgaatccctgcattcaattcttttgcatatatacccaggagcagaatgatggatcatatggtaattctgtgtttatttatttgaggaacaaacttgccgttttccataacagctgcactattttacattcccactaacagtgcattaggcttccaattctctatgccctcaccaacacttgttttctgggttttaaaagaagtagtagtcatccttgtaggtgtcaggtggtatctcattgtcgttttgcttcatgttttcctaaagattagtaattttcatatgcttattgaccatttgtatatcttcttcggagaagtgtctatttgagtctttccccaattttgattggtttgtttgttttttgttgttgagttgtagggattcttttatattctggatattaatcccttatcagatatttgttttacaaatattttctttgtaacaacagaaacacaccacagtcttcaaggttggaagccagttaatctgagtagcattttgttagtggtggggagaggatttgttcctcctgaaatcctggggaattggccacctcctcttctcctcttaggcatgaagcgcgtctggcttctccaaagaactcttcccctccactacctcagagttagcttcctctcttcagccagtgatcctggggtcccagacacaataattaaccaagagagggtgaaaggctccctgctgtgtttatgcaatggctcaggcccttgtgaagtgccgagggaccccaagcagcctccatctcccagggcatggtccatccccagctttcacagaacaggaaagctgtggaggagtgtgggcagcagggtaggaatggatatagcccttggcaacaacacatttccccacaaagcacccacccaaaagaacaacaacgatagttttagtttttagtaatgagaacaatagttctcatgactaaaagccatcagccaggacactgttctcaacccttttgcggtctttggaccctttgaaactctgacagaagccatggaggaatgttctcactgagtgcatgcactcaaaatgatgcattcaacttcaattcagtttcagggatgtatggcctgaccaccaatgcaggggattagcaatcgcaatagtggagagggcatgggagtgggaatctggctggatcaagcaagtggatgccagcagcccagaaaaagagcccccctacctgctttttccttcctgggcactattgcccagcaaatgccttcctctttccgcttctcctacctccccacccaaaattttcattctgcacagtgattgccacattcactggttgagaaacagagactgtagcaactctggcagggagaagctgtctctgatggcctgaagctgtgggcagctggccaagcctaaccgctataaaaaggagctgcctctcagccctgcatgtctcttgtcagctgtctttcagaagacctggtaagtgggactgtctgggttggccccgcactttgggcttctcttggggagggtcagggaagtggagcagccttcctgagagaggagagagaaagctcagggaggtctggagcaaagatactcctggaggtggggagtgaggcagggataaggaaggagagtatcctccagcaccttccagtgggtaagggcacattgtctcctaggctggacttttcttgagcagagggtggggtggtaaggaaagtctacgggcccccgtgtgtgtgcacatgtctctgtgtgaatggacccttccccttcccacacgtgtatccctatcatcccacccttcccaccagaggccatagccatctgctggtttggttatttgagagtgcaggccaggacaaggccatcgcttggggcatgaatcctctgcgtactgccctggccagatgcaaattccctgccatgggattccccagaaggttctgtttttcaggtggggcaagttccgtgggcatcatgttgaccgagctggagaaagccttgaactctatcatcgacgtctaccacaagtactccctgataaaggggaatttccatgccgtctacagggatgacctgaagaaattgctagagaccgagtgtcctcagtatatcagggtgaggaggggctgggtgtggcgggggctctctgcctggtcctggggctgccctgggccagcggtcctccctgccacccttcatagatgctatgcctcggctctctctgagatctttaaactctggcttcttcctcctcaatcttgacagaaaaagggtgcagacgtctggttcaaagagttggatatcaacactgatggtgcagttaacttccaggagttcctcattctggtgataaagatgggcgtggcagcccacaaaaaaagccatgaagaaagccacaaagagtagctgagttactgggcccagaggctgggcccctggacatgtacctgcagaataataaagtcatcaatacctcatgcctctctcttatgcttttgtggaatgaggttcctcggtgtggagggagggttggaaaacccaaaggaagaaaaagaaatctatgttatcccaccctacctctcacaagcctttcctgctttacccctcacctggcctctgccccacattccttcagcccctcatttcgagcattggatttgaggcttaaggattcaaaaagtcgtcatgaatatagctgatgattttatagtggttctgaaatgggtcggggatttgggaacagggtggtagtataagaacaactgatactgttctctaagctaaatcttagcttccagctacctgtcttagatgtggctcttgggaaccttagagtgatagctacatagaagtgtgtgggtgtgtgtgtgtgtgtctgtgtgtgtgtgtgtgagagagagacagacagaaagagagcaagagagggaaggggggagaggctgattgtgtgtgtggtgtgatgtaggtggacaatgttcagagtcctccattaacaggataatcctcacacctgtccacatacctgtagtttgtccttggggattttgaaaatttttcctccctctccactcccaaactcccaactcaattaaatgataaaggaataggcaaataggaaaataaattagtaaaacttaagtcaaagaataggttattcatacgctgcctatgggattctatgctttgtgatcagaaaattatctaaaaaatacttcccaagggctggtacaagggaggccagaagacgagtggttcttctctgaggtggacattaaaaaaagaagaaaatgaaggggaaccttttgacaagaatgtcaccccaaactggattttcatgctgtggtgtggggaattttctgttgtcctcacttaggtgctggggcagtggtgttagtgatgggtaaaaaggtaggaagctgtcacagaatcactaaaccagggttcttaacttgtctgtctatacatctctgaaattgggttgaagttgtgtgcatcattttgagtgacgcactgagaacattcctccacggcttccatcgagagtctcgaaaaggcccaacacctcaaaaaggttaagaacacttgtcctgcttactggtttttagtaacaaatggcagagtatttctctctgtctctctctctttttttttttttttttttgagacacagggtcttgtctgtcacgtggactagagtacaatgggcatgatcatgggctcactgtagcctcgaacacctgggctcaagtaatcctcccacctcagcctctttagtagctgggactacagcatgagccactgcccttggctaatttttaaattatttttttgtagagatggaaacttgctatgttgcccaggctagtctcaaactcctggactcaagcgatcctcctaccttggcctcccaaagtgctgagattacagtgtgatccacaccacacctggccaaagattggagtatttttattgctattgttgtgctgggtgggtgggtgggtgtatgctttgtggggacgtgtgttgttgccaagggctaaatcagttcctaccctgctgcccacagtcctccacagctttcctgctctgtgaagctaaggatacaccccgatgataagctgtcaacata

SEQ ID NO: 682 - DNA, 1202 bp, Homo sapiens; identical to SEQ ID NO: 54

SEQ ID NO: 683 - DNA, 2577 bp, Homo sapiens; identical to SEQ ID NO: 55

SEQ ID NO: 684 - DNA, 9497 bp, Homo sapiens
  misc_feature 6765: n = A,T,C or G
caaacatgtcagctgttactggaagtggcctggcctctatttatcttcctgatcctgatctctgttcggctgagctacccaccctatgaacaacatgaatgccattttccaaataaagccatgccctctgcaggaacacttccttgggttcaggggattatctgtaatgccaacaacccctgtttccgttacccgactcctggggaggctcccggagttgttggaaactttaacaaatccattgtggctcgcctgttctcagatgctcggaggcttcttttatacagccagaaagacaccagcatgaaggacatgcgcaaagttctgagaacattacagcagatcaagaaatccagctcaaacttgaagcttcaagatttcctggtggacaatgaaaccttctctgggttcctgtatcacaacctctctctcccaaagtctactgtggacaagatgctgagggctgatgtcattctccacaaggtatttttgcaaggctaccagttacatttgacaagtctgtgcaatggatcaaaatcagaagagatgattcaacttggtgaccaagaagtttctgagctttgtggcctaccaagggagaaactggctgcagcagagcgagtacttcgttccaacatggacatcctgaagccaatcctgagaacactaaactctacatctcccttcccgagcaaggagctggccgaagccacaaaaacattgctgcatagtcttgggactctggcccaggagctgttcagcatgagaagctggagtgacatgcgacaggaggtgatgtttctgaccaatgtgaacagctccagctcctccacccaaatctaccaggctgtgtctcgtattgtctgcgggcatcccgagggaggggggctgaagatcaagtctctcaactggtatgaggacaacaactacaaagccctctttggaggcaatggcactgaggaagatgctgaaaccttctatgacaactctacaactccttactgcaatgatttgatgaagaatttggagtctagtcctctttcccgcattatctggaaagctctgaagccgctgctcgttgggaagatcctgtatacacctgacactccagccacaaggcaggtcatggctgaggtgaacaagaccttccaggaactggctgtgttccatgatctggaaggcatgtgggaggaactcagccccaagatctggaccttcatggagaacagccaagaaatggaccttgtccggatgctgttggacagcagggacaatgaccacttttgggaacagcagttggatggcttagattggacagcccaagacatcgtggcgtttttggccaagcacccagaggatgtccagtccagtaatggttctgtgtacacctggagagaagctttcaacgagactaaccaggcaatccggaccatatctcgcttcatggagtgtgtcaacctgaacaagctagaacccatagcaacagaagtctggctcatcaacaagtccatggagctgctggatgagaggaagttctgggctggtattgtgttcactggaattactccaggcagcattgagctgccccatcatgtcaagtacaagatccgaatggacattgacaatgtggagaggacaaataaaatcaaggatgggtactgggaccctggtcctcgagctgacccctttgaggacatgcggtacgtctgggggggcttcgcctacttgcaggatgtggtggagcaggcaatcatcagggtgctgacgggcaccgagaagaaaactggtgtctatatgcaacagatgccctatccctgttacgttgatgacatctttctgcgggtgatgagccggtcaatgcccctcttcatgacgctggcctggatttactcagtggctgtgatcatcaagggcatcgtgtatgagaaggaggcacggctgaaagagaccatgcggatcatgggcctggacaacagcatcctctggtttagctggttcattagtagcctcattcctcttcttgtgagcgctggcctgctagtggtcatcctgaagttaggaaacctgctgccctacagtgatcccagcgtggtgtttgtcttcctgtccgtgtttgctgtggtgacaatcctgcagtgcttcctgattagcacactcttctccagagccaacctggcagcagcctgtgggggcatcatctacttcacgctgtacctgccctacgtcctgtgtgtggcatggcaggactacgtgggcttcacactcaagatcttcgctagcctgctgtctcctgtggcttttgggtttggctgtgagtactttgccctttttgaggagcagggcattggagtgcagtgggacaacctgtttgagagtcctgtggaggaagatggcttcaatctcaccacttcggtctccatgatgctgtttgacaccttcctctatggggtgatgacctggtacattgaggctgtctttccaggccagtacggaattcccaggccctggtattttccttgcaccaagtcctactggtttggcgaggaaagtgatgagaagagccaccctggttccaaccagaagagaatatcagaaatctgcatggaggaggaacccacccacttgaagctgggcgtgtccattcagaacctggtaaaagtctaccgagatgggatgaaggtggctgtcgatggcctggcactgaatttttatgagggccagatcacctccttcctgggccacaatggagcggggaagacgaccaccatgtcaatcctgaccgggttgttccccccgacctcgggcaccgcctacatcctgggaaaagacattcgctctgagatgagcaccatccggcagaacctgggggtctgtccccagcataacgtgctgtttgacatgctgactgtcgaagaacacatctggttctatgcccgcttgaaagggctctctgagaagcacgtgaaggcggagatggagcagatggccctggatgttggtttgccatcaagcaagctgaaaagcaaaacaagccagctgtcaggtggaatgcagagaaagctatctgtggccttggcctttgtcgggggatctaaggttgtcattctggatgaacccacagctggtgtggacccttactcccgcaggggaatatgggagctgctgctgaaataccgacaaggccgcaccattattctctctacacaccacatggatgaagcggacgtcctgggggacaggattgccatcatctcccatgggaagctgtgctgtgtgggctcctccctgtttctgaagaaccagctgggaacaggctactacctgaccttggtcaagaaagatgtggaatcctccctcagttcctgcagaaacagtagtagcactgtgtcatacctgaaaaaggaggacagtgtttctcagagcagttctgatgctggcctgggcagcgaccatgagagtgacacgctgaccatcgatgtctctgctatctccaacctcatcaggaagcatgtgtctgaagcccggctggtggaagacatagggcatgagctgacctatgtgctgccatatgaagctgctaaggagggagcctttgtggaactctttcatgagattgatgaccggctctcagacctgggcatttctagttatggcatctcagagacgaccctggaagaaatattcctcaaggtggccgaagagagtggggtggatgctgagacctcagatggtaccttgccagcaagacgaaacaggcgggccttcggggacaagcagagctgtcttcgcccgttcactgaagatgatgctgctgatccaaatgattctgacatagacccagaatccagagagacagacttgctcagtgggatggatggcaaagggtcctaccaggtgaaaggctggaaacttacacagcaacagtttgtggcccttttgtggaagagactgctaattgccagacggagtcggaaaggattttttgctcagattgtcttgccagctgtgtttgtctgcattgcccttgtgttcagcctgatcgtgccaccctttggcaagtaccccagcctggaacttcagccctggatgtacaacgaacagtacacatttgtcagcaatgatgctcctgaggacacgggaaccctggaactcttaaacgccctcaccaaagaccctggcttcgggacccgctgtatggaaggaaacccaatcccagacacgccctgccaggcaggggaggaagagtggaccactgccccagttccccagaccatcatggacctcttccagaatgggaactggacaatgcagaacccttcacctgcatgccagtgtagcagcgacaaaatcaagaagatgctgcctgtgtgtcccccaggggcaggggggctgcctcctccacaaagaaaacaaaacactgcagatatccttcaggacctgacaggaagaaacatttcggattatctggtgaagacgtatgtgcagatcatagccaaaagcttaaagaacaagatctgggtgaatgagtttaggtatggcggcttttccctgggtgtcagtaatactcaagcacttcctccgagtcaagaagttaatgatgccaccaaacaaatgaagaaacacctaaagctggccaaggacagttctgcagatcgatttctcaacagcttgggaagatttatgacaggactggacaccagaaataatgtcaaggtgtggttcaataacaagggctggcatgcaatcagctctttcctgaatgtcatcaacaatgccattctccgggccaacctgcaaaagggagagaaccctagccattatggaattactgctttcaatcatcccctgaatctcaccaagcagcagctctcagaggtggctccgatgaccacatcagtggatgtccttgtgtccatctgtgtcatctttgcaatgtccttcgtcccagccagctttgtcgtattcctgatccaggagcgggtcagcaaagcaaaacacctgcagttcatcagtggagtgaagcctgtcatctactggctctctaattttgtctgggatatgtgcaattacgttgtccctgccacactggtcattatcatcttcatctgcttccagcagaagtcctatgtgtcctccaccaatctgcctgtgctagcccttctacttttgctgtatgggtggtcaatcacacctctcatgtacccagcctcctttgtgttcaagatccccagcacagcctatgtggtgctcaccagcgtgaacctcttcattggcattaatggcagcgtggccacctttgtgctggagctgttcaccgacaataagctgaataatatcaatgatatcctgaagtccgtgttcttgatcttcccacatttttgcctgggacgagggctcatcgacatggtgaaaaaccaggcaatggctgatgccctggaaaggtttggggagaatcgctttgtgtcaccattatcttgggacttggtgggacgaaacctcttcgccatggccgtggaaggggtggtgttcttcctcattactgttctgatccagtacagattcttcatcaggcccagacctgtaaatgcaaagctatctcctctgaatgatgaagatgaagatgtgaggcgggaaagacagagaattcttgatggtggaggccagaatgacatcttagaaatcaaggagttgacgaagatatatagaaggaagcggaagcctgctgttgacaggatttgcgtgggcattcctcctggtgagtgctttgggctcctgggagttaatggggctggaaaatcatcaactttcaagatgttaacaggagataccactgttaccagaggagatgctttccttaacagaaatagtatcttatcaaacatccatgaagtacatcagaacatgggctactgccctcagtttgatgccatcacagagctgttgactgggagagaacacgtggagttctttgcccttttgagaggagtcccagagaaagaagttggcaaggttggtgagtgggcgattcggaaactgggcctcgtgaagtatggagaaaaatatgctggtaactatagtggaggcaacaaacgcaagctctctacagccatggctttgatcggcgggcctcctgtggtgtttctggatgaacccaccacaggcatggatcccaaagcccggcggttcttgtggaattgtgccctaagtgttgtcaaggaggggagatcagtagtgcttacatctcatagtatggaagaatgtgaagctctttgcactaggatggcaatcatggtcaatggaaggttcaggtgccttggcagtgtccagcatctaaaaaataggtttggagatggttatacaatagttgtacgaatagcagggtccaacccggacctgaagcctgtccaggatttctttggacttgcatttcctggaagtgttccaaaagagaaacaccggaacatgctacaataccagcttccatcttcattatcttctctggccaggatattcagcatcctctcccagagcaaaaagcgactccacatagaagactactctgtttctcagacaacacttgaccaagtatttgtgaactttgccaaggaccaaagtgatgatgaccacttaaaagacctctcattacacaaaaaccagacagtagtggacgttgcagttctcacatcttttctacaggatgagaaagtgaaagaaagctatgtatgaagaatcctgttcatacggggtggctgaaagtaaagaggnactagactttcctttgcaccatgtgaagtgttgtggagaaaagagccagaagttgatgtgggaagaagtaaactggatactgtactgatactattcaatgcaatgcaattcaatgcaatgaaaacaaaattccattacaggggcagtgcctttgtagcctatgtcttgtatggctctcaagtgaaagacttgaatttagttttttacctatacctatgtgaaactctattatggaacccaatggacatatgggtttgaactcacactttttttttttttttgttcctgtgtattctcattggggttgcaacaataattcatcaagtaatcatggccagcgattattgatcaaaatcaaaaggtaatgcacatcctcattcactaagccatgccatgcccaggagactggtttcccggtgacacatccattgctggcaatgagtgtgccagagttattagtgccaagtttttcagaaagtttgaagcaccatggtgtgtcatgctcacttttgtgaaagctgctctgctcagagtctatcaacattgaatatcagttgacagaatggtgccatgcgtggctaacatcctgctttgattccctctgataagctgttctggtggcagtaacatgcaacaaaaatgtgggtgtctctaggcacgggaaacttggttccattgttatattgtcctatgcttcgagccatgggtctacagggtcatccttatgagactcttaaatatacttagatcctggtaagaggcaaagaatcaacagccaaactgctggggctgcaagctgctgaagccagggcatgggattaaagagattgtgcgttcaaacctagggaagcctgtgcccatttgtcctgactgtctgctaacatggtacactgcatctcaagatgtttatctgacacaagtgtattatttctggctttttgaattaatctagaaaatgaaaagatggagttgtattttgacaaaaatgtttgtactttttaatgttatttggaattttaagttctatcagtgacttctgaatccttagaatggcctctttgtagaaccctgtggtatagaggagtatggccactgccccactatttttattttcttatgtaagtttgcatatcagtcatgactagtgcctagaaagcaatgtgatggtcaggatctcatgacattatatttgagtttctttcagatcatttaggatactcttaatctcacttcatcaatcaaatattttttgagtgtatgctgtagctgaaagagtatgtacgtacgtataagactagagagatattaagtctcagtacacttcctgtgccatgttattcagctcactggtttacaaatataggttgtcttgtggttgtaggagcccactgtaacaatactgggcagcctttttttttttttttaattgcaacaatgcaaaagccaagaaagtataagggtcacaagtctaaacaatgaattcttcaacagggaaaacagctagcttgaaaacttgctgaaaaacacaacttgtgtttatggcatttagtaccttcaaataattggctttgcagatattggataccccattaaatctgacagtctcaaatttttcatctcttcaatcactagtcaagaaaaatataaaaacaacaaatacttccatatggagcatttttcagagttttctaacccagtcttatttttctagtcagtaaacatttgtaaaaatactgtttcactaatacttactgttaactgtcttgagagaaaagaaaaatatgagagaactattgtttggggaagttcaagtgatctttcaatatcattactaacttcttccactttttccaaaatttgaatattaacgctaaaggtgtaagacttcagatttcaaattaatctttctatattttttaaatttacagaatattatataacccactgctgaaaaagaaaaaaatgattgttttagaagttaaagtcaatattgattttaaatataagtaatgaaggcatatttccaataactagtgatatggcatcgttgcattttacagtatcttcaaaaatacagaatttatagaataatttctcctcatttaatatttttcaaaatcaaagttatggtttcctcattttactaaaatcgtattctaattcttcattatagtaaatctatgagcaactccttacttcggttcctctgatttcaaggccatattttaaaaaatcaaaaggcactgtgaactattttgaagaaaacacaacattttaatacagattgaaaggacctcttctgaagctagaaacaatctatagttatacatcttcattaatactgtgttaccttttaaaatagtaattttttacattttcctgtgtaaacctaattgtggtagaaatttttaccaactctatactcaatcaagcaaaatttctgtatattccctgtggaatgtacctatgtgagtttcagaaattctcaaaatacgtgttcaaaaatttctgcttttgcatctttgggacacctcagaaaacttattaacaactgtgaatatgagaaatacagaagaaaataataagccctctatacataaatgcccagcacaattcattgttaaaaaacaaccaaacctcacactactgtatttcattatctgtactgaaagcaaatgctttgtgactattaaatgttgcacatcattcattcaaaaaaaaaaaaaaaaaaa

SEQ ID NO: 685 - DNA, 7247 bp, Homo sapiens; identical to SEQ ID NO: 57

SEQ ID NO: 686 - DNA, 3001 bp, Homo sapiens; identical to SEQ ID NO: 58

SEQ ID NO: 687 - DNA, 5869 bp, Homo sapiens
ctcgaggatctcggctcactgcaacctccgcctcccaggttcaagctgttcttctgcctcagcctcccgagtagctgggattacaggcgcctgccaccatgccctgctaatttttgtatttttagtagagatggggtttcaccgtgttggccagactggtctcgaactcctgacctcgtgatccacccgcctcagcctcccaaatgctgggattacagatgtgagccaccgcacccggcctggcagaggatactttttaaggtcaaagacagtagcagaggtggagttcctgggaacagggtcatgaggggaagagggggttcggagggagcgagtagccactggctacctctagaaagggaaggctttggtgcaacatcgttcccctgcagttttactcatctttgcttcctgccctttcatcatccaatcgggcaggcaggacagggcctgagggggcagggatccagtgggtgcctctctagactaaccccagctcaggactcccagagccccttccctgaggccctgctgcccccaagcccagattggggatcccaagcagcacgtaggcagagccagtgaggtccccgttagtcccattgaaagctctaaaaccagcgaaccctcagtccagcctcaggtcaggcatccaggacggcctcagccctcatgggtgagccatctctgcggacactgcacagggcctacgatccatcgctgcctcccgaggatgccagccaggcccccgttgagataactgcttccctgctggacaaggctgggaccagccatctcggtgacagttccagaacccctggcctgggctgctgggttcaatggaaaaaggctgtgactagagtcagggggatggtctcagtgacctcaaggataaggccagatccttgcactgtcagtgacccaaagcaacaggtgtccagagcagcagtgtggcgccttcacgcccccacacatcagcccaactcacccaggacagggactgtagcctcagcactcaacccatgtgccctgtgtggggtctcttcccactgcactcacaggagaggaagggtccctcaggggtccactggggtcccctcctgcaaatggggcaaggagaggggcaaggggctgtctcaaggcccctggagcacatgcaggtcctggactggggctcctgggagggccatgattctgggctccatgagttcagagcagacgccttgtttttccttgtccactgtcagccaccccacccttccctgacccttaaaagaaccaggaaacagcacatgatctgttggaaggaggcattcattctttcctttctgtgggtgtggggaggggaccacagggcacataccccaccctgggatccagctgagcaggggggtcagagatgacagctcttccggctcacaggccaccggcccacatacagggcaatcagaagaaagaaacagcacaaggaaggcacagagggagtcgttgtccctgccagaggtgcagcactccgggaatgtccctcactctccccgtccctctgtcttgcccaatcctgaccaggtgcagaaatcttgccaagtgtttccgcaggagttgctggcaattgcctcacattcctggccttggcaaagaatgaatcaacccaccctagatcccataaatagggccacccaggtgagcctctcactcgccacctcctcttccacccctgccaggcccagcagccaccacagcgcctgcttcctcggccctgaaatcatgcccctaggtctcctgtggctgggcctagccctgttgggggctctgcatgcccaggcccaggactccacctcagacctgatcccagccccacctctgagcaaggtccctctgcagcagaacttccaggacaaccaagtaaggggccaagaggggcacctgcaggcagggcctggggaagagtgggagcagaggggaggagaggtgaagagactcaggaagagcgttgggcaggacttaggagtccagggtccaggtttcagctcactctgtgccaccagggtcccctggtggaaaccatgccccttccccccatccccaccccctctcagcctgaacagactcccccaggtccacatcccctctcccataacccccattgtccaaagaaggtgggagcacttttagtccccctgcacagatgaggaaactgaggctcaggaaggcccaccagccacatgcctcctccagtgaggaggtcaccctcctccctgccagactcagaaccgcctcttcccccaggactcccttctggactgatggcctcctgctcctgccccttcaccagtgcaggcccagcctgggccctgctgcccagctagaggggctcatggttccaagctgggcggcccagaggtgccacagggacagagctggaggggtggctcctagggccattcctgggttgtgcctcttatcagtcccttgcagttccaggggaagtggtatgtggtaggcctggcagggaatgcaattctcagagaagacaaagacccgcaaaagatgtatgccaccatctatgagctgaaagaagacaagagctacaatgtcacctccgtcctgtttaggtgagggccgacatctcctgggggtgtgagagtcagactgacgtcacaggcaagggatggccaaagctgagggatcctgtcgttcacctcgctgttctgcccggaattcatctgtgttcatccttcctctgttccttagagcaacgtttatagcacatttccatgcagacacacagacagtggtggggatggacatgcacagtcgttagaaaacaagacggagagaggaggggtgcctgggagcgggaggaggggacactggatccagcctggaaccccacccagtgccttcatggaaggcttccagggaggtggccttaaaagagccaacctgcttcaaaaggaaatgtggggtgttcccggcaggggctggagtcagagagagcccccccttcaggaaggagcaagccatcgcagggtcaccctgagcagagctgctgagcagcctggaggggcaggtggccacgctagcacctagcacggtcctcaggccccgccccagcggatctgctgcggagtggcttagagcagggctcttgggccgcagggtggggagacttggtggggtgcagcctagggggtcgggagaccagcgaaagtgaagcggggccgtcacaggtgtgagagaacaggcgcagggtgaagaggcagggagccagggatcagccgcccccagtgggtttctgactctggcagctgagtggattgggattggggcatttgtggagcaaggagcagaatacagacaggttggggagctcagccctggggtgccaggggatgggaagtgggaggactcaaggatggggtcaggtttgacccgagagctaggggaacggctggcatggagcagactggaagtaccgaggtggatccccgggagagggtataggaagggaagcagcaagctgagtgcaggggagaaatgcagggtttcctgtgtgttgggtggcggcgggggtgaaagccacccagggaggcagccaaaggaaagaaggacatcgggtgctggagggtctgagtggggtccaggggccccaggcaggccaggagggacagcctggtgtcagctcagggagaaggcccaggcccatctcggctgggtggggtagggcccctccaggtagtgggggatgagctgtcacgggttgggccggactgagagcaacagaaccctgctgctgccctggccccaccttgtccagcacaggaggcccaagcctgggttgtctcccctctcacccacccatctctccctcccaaggaaaaagaagtgtgactactggatcaggacttttgttccaggttgccagcccggcgagttcacgctgggcaacattaagagtgagtcttgagtgaggtggggcactgagttggggctccggggagctgggtaggggcacagaccttcctgcccctccacacagatgtgttgtatggggagaagcccacgttgatgggctggggagggaggggacagctccctcctcccatccagggcagggctgacccctcaccgtccacgcctgcaggttaccctggattaacgagttacctcgtccgagtggtgagcaccaactacaaccagcatgctatggtgttcttcaagaaagtttctcaaaacagggagtacttcaagatcaccctctacggtgggtcctctcccatcccctcggggactggctcctgatcacacttagtgggaggggaggccggtcccccatgaggaagggatctgaggcctcatctactcattcaacgatatttatgtggtgtctgccggccactcactggccatcttggtcacagggagaaccaaggagctgacttcggaactaaaggagaacttcatccgcttctccaaatatctgggcctccctgaaaaccacatcgtcttccctgtcccaatcggtaatggccagtctggatgaggggacggggacatggggactgttcaggcaggatgcttccctaccagggatcagggagaggagggactccgtcctcagcttcagtcactggagcagtggatggtccaggagctccttggaagccactctgggcccaggaagactgtgccccaccccagggtctatgggactcccagggacccaggccgcaagtgctctttcctggcagtttagcccgggtctgcccagacaaggatttcaggcccaggcctgagtatccatttctcagtctcactggcctgacacctctggccaccctcccaggcccccttgttctgggccatctcccccgaccctcccaggcctcgtcaccctgggttttgctgtcctggctgtcctctctcccctggggacttgctcaccactgacttgggagctgtccttgactccagggagcctggcttgggcaggaggctccagccaggccattcagagagccactggcctcccccaggctgagagactgcctggactggtaaacaggcaggagacctgggtgcccgaggagcctgggagctgggcctcactcagggcagcccctccccaggcctttctcccacatcccctgccctgccatccacccctctgttgccccatctctgaaaggaacccccatatcttctgcagctgggccaggtggggcaggggctgcccaggggcagtgcagaggacctggcagtcagggatcacacacacacactcatacacgcacacacacacacagctgcctgttctgacggactttctccctaacagaccagtgtatcgacggctgagtgcacagtgagtgtggctgggcggctgcgagggggcttgtgggaggccagggtgcagtgggctgggggtcttgggcctgcctttgctcatccccctgccccccagcactgctgctgtctttattctgctgtccccatctcgggtgcctcccatttccccacccatcaccctcatatccacctctgtccagggtgccgccagctgccgcaccagcccgaacaccattgagggagctgggagaccctccccacagtgccacccatgcagctgctccccaggccaccccgctgatggagccccaccttgtctgctaaataaacatgtgccctcaggcctctgagtctacactgtttgacccctgggccttcgaggaaggggaggggcgggaggctcccactggcatcactctcagggtctgcacccccaggatggagcctagcgaacccagcctgggtgttagggctgcagagtgaagacacaagcccctggtcatcaccagcagctttgtgg

SEQ ID NO: 688 - DNA, 2589 bp, Homo sapiens; identical to SEQ ID NO: 60

SEQ ID NO: 689 - DNA, 1229 bp, Homo sapiens; identical to SEQ ID NO: 61

SEQ ID NO: 690 - DNA, 2512 bp, Homo sapiens
ggcacgagggggagcaggggaagggaatgtgaccaggtctaggtctggagtttcagcttggacactgagccaagcagacaagcaaagcaagccaggacacaccatcctgccccaggcccagcttctctcctgccttccaacgccatggggagcaatctcagcccccaactctgcctgatgccctttatcttgggcctcttgtctggaggtgtgaccaccactccatggtctttggcctggccccagggatcctgctctctggagggggtagagatcaaaggcggctccttccgacttctccaagagggccaggcactggagtacgtgtgtccttctggcttctacccgtaccctgtgcagacacgtacctgcagatctacggggtcctggagcaccctgaagactcaagaccaaaagactgtcaggaaggcagagtgcagagcaatccactgtccaagaccacacgacttcgagaacggggaatactggccccggtctccctactacaatgtgagtgatgagatctctttccactgctatgacggttacactctccggggctctgccaatcgcacctgccaagtgaatggccggtggagtgggcagacagcgatctgtgacaacggagcggggtactgctccaacccgggcatccccattggcacaaggaaggtgggcagccagtaccgccttgaagacagcgtcacctaccactgcagccgggggcttaccctgcgtggctcccagcggcgaacgtgtcaggaaggtggctcttggagcgggacggagccttcctgccaagactccttcatgtacgacacccctcaagaggtggccgaagctttcctgtcttccctgacagagaccatagaaggagtcgatgctgaggatgggcacggcccaggggaacaacagaagcggaagatcgtcctggacccttcaggctccatgaacatctacctggtgctagatggatcagacagcattggggccagcaacttcacaggagccaaaaagtgtctagtcaacttaattgagaaggtggcaagttatggtgtgaagccaagatatggtctagtgacatatgccacataccccaaaatttgggtcaaagtgtctgaagcagacagcagtaatgcagactgggtcacgaagcagctcaatgaaatcaattatgaagaccacaagttgaagtcagggactaacaccaagaaggccctccaggcagtgtacagcatgatgagctggccagatgacgtccctcctgaaggctggaaccgcacccgccatgtcatcatcctcatgactgatggattgcacaacatgggcggggacccaattactgtcattgatgagatccgggacttgctatacattggcaaggatcgcaaaaacccaagggaggattatctggatgtctatgtgtttggggtcgggcctttggtgaaccaagtgaacatcaatgctttggcttccaagaaagacaatgagcaacatgtgttcaaagtcaaggatatggaaaacctggaagatgttttctaccaaatgatcgatgaaagccagtctctgagtctctgtggcatggtttgggaacacaggaagggtaccgattaccacaagcaaccatggcaggccaagatctcagtcattcgcccttcaaagggacacgagagctgtatgggggctgtggtgtctgagtactttgtgctgacagcagcacattgtttcactgtggatgacaaggaacactcaatcaaggtcagcgtaggaggggagaagcgggacctggagatagaagtagtcctatttcaccccaactacaacattaatgggaaaaaagaagcaggaattcctgaattttatgactatgacgttgccctgatcaagctcaagaataagctgaaatatggccagactatcaggcccatttgtctcccctgcaccgagggaacaactcgagctttgaggcttcctccaactaccacttgccagcaacaaaaggaagagctgctccctgcacaggatatcaaagctctgtttgtgtctgaggaggagaaaaagctgactcggaaggaggtctacatcaagaatggggataagaaaggcagctgtgagagagatgctcaatatgccccaggctatgacaaagtcaaggacatctcagaggtggtcacccctcggttcctttgtactggaggagtgagtccctatgctgaccccaatacttgcagaggtgattctggcggccccttgatagttcacaagagaagtcgtttcattcaagttggtgtaatcagctggggagtagtggatgtctgcaaaaaccagaagcggcaaaagcaggtacctgctcacgcccgagactttcacatcaacctctttcaagtgctgccctggctgaaggagaaactccaagatgaggatttgggttttctataaggggtttcctgctggacaggggcgtgggattgaattaaaacagctgcgacaacaaaaaaaaaaaaaaaaaaaa

SEQ ID NO: 691 - DNA, 2038 bp, Homo sapiens; identical to SEQ ID NO: 63

SEQ ID NO: 692 - DNA, 2772 bp, Homo sapiens; identical to SEQ ID NO: 64

SEQ ID NO: 693 - DNA, 6711 bp, Homo sapiens
gaattcccttgtaaggttttcttaacaaaacaccagtcacataagtgcattttattttatatttttgtttatttatttgagacggagtctcttgtctctcaggctggagtgcagtggcgccatctctgctcgctgcaacctccacctcctgggttccagcgattctcctgcctcagcctcccgagggggtagctgggactacaggtgcgcaccaccatgcccagctaattttgtatttttcgtagagatggggtttcaccatgttgtccaggctggtcttgaactcctgacctcaggtgatcctcccgcctcggcctcccaaagtgctggaattacaggcgtgatccaccgcacccggcctattttttgagagagggtcacactctgtcgtcccggctggaatgcagtgatgcgatcaccgcccactacagcctcgacctccgggctcaagcaatcctccccgcccagcctcctgagtagcgagcgcctcgacgcccagctaatttttatttttatttatttttttgtagagacggcgtctctctaagatgcccaggctggtggccggtgtcgaactcctaagatgaagcgatcctccccggccttggcctccgcgcctcctaaagcgccaggtatgagccaccgcgcctggcctacaagtgcattttaattaaagtattattaatgtctttgcctgaagaaattcgcttttaaattgtgacttatctttcacccaaaaatcaaagcacaattcagccccgaggcgggggcggtaggagctgggcggggcgggggcagggaaagaccaggagcagagattcaaaaagagtaagagggcaaaatgtgcataatgcatcttcacaggtaagagcctggccaggctcctgttttaatggcttcctcctgaagaagattcaagcagagtgtaagatattttcggaaagtagagcattttgaaagcatttcataatctctcaaaaccggagactgctcctgtcccacctcgttagagaaaacagcgatgctcaaaggcaacctccttcctgacattgcctggtaggacgcgacgtggtgtttgcccgcgcggaatgcggacgcaaggctgctcctaggtctcggggacgcgccatccccatttccgctcgcggaggcgtagggtccgggcgcgggaccccagtcgaccttgactggcggcgcgaccttgaggcctgcgttcgcctcagttgccccctctgtgcaatggggagacgcgcctcatcgcttgacaacggccgaagagccgccgcgcttccgtctcccgcgtgcgcgcgccatgctgcccacccccgttccgcactgaccctcccccgtgccccgcgtcccgtactgccgccccgccccgagtcccatgccgcagccaccgcgacggagcccgcaggcgggaacctgcctccgcgcgttagcgcgcacgcgcgcctcatgtgtcgtccccatcagcgccggcttccgtctataggccagatgcactgtcactctggcgaagtcgcagacccgattggccgggacggaggcgcgagaccgggttgcgggcggggccgaacgtggtataaaacgggcgggaggccaggctcgtgccgttttgcagacgccaccgccgaggaaaaccgtgtactattagccatggtcaaccccaccgtgttcttcgacattgccgtcgacggcgagcccttgggccgcgtctcctttgaggtcgggcgggcggcggcgtgcgggaatggggcccagaaagtgggccggggtcggggtgggtggtagcgccccaaaggcccgggcgcggggcgaccctgcttgaggggcgagcgcgggcgggctgcggcgccatttcctgacgaggggccattttgggaggtccgcgagtcgcgggaggaggccgggacgcggcggacaaaggcaggcggggcggctgcgaggccgttgggggagggggcccgcgtccgcccgcccgcctcatgtggccgcgccctgtcctgtccgacgcacgtgctcggcggccgcgctcaggtccgcgccttgagagtcgttgtccgccctagcttggcctgggcgccgcagaccggagccagaagcacgctcgcgggggcttgcgaccgccttcctgggaagctgtcccctggcaggcatgggtgctttacatcctgagctgggaagctgtttgcttgagggtttttctcaaggatcgaggcgcggtgtgagcccgtccatgctcggtcctgtagatcccgggaggccatgttataaaaggagacttgctgggatgtgacgggttgccacttgaaatatcttccatttggataaagtaggaatatttatacatgtgccccaaacgtccctccgtgtcccccacccccaagcggaaatgtgaaaatgggccttgcctttgctggtgcccaaggaccgccttccactgcagtgacggcgctggcgggggaggcgctcttgagcccctcccgattgtccctctgcctagcaagcaagttgcgactggccacaaggcaggcctcttccgaccaaggtggattaccagtgattacctaattagttttgagagcgttaaatgagttcttaaagatcagttgtaattatagcatagtatctaaacttggcgcgtgtcttcaaagttaaatattgagtacgattccgttccagttaacatggatagaccttagggagtagcgaaataggatgttagtggttttattcctttaaatcacatctcaaaaggccaccaatggctagtttggatcttattccgaaaatagattgatcctcatgcagtcttcgtgaggacagagcgatttccttgttgcctaccctgtccatagtgcctggcacataggcactgaaacactgcatgttaatccacaccccaccccacctatgagtgtagtcaaagctggtaagtgacaagggctttcgtggaaacttggcctgacctaatgttgggcatcaggttacccaaagagcttcagggaaatgagaaaggacttgcaggtcttgatgagaatggaggggtaactgccaatgagggctttggctttagcgaaagtctgaaagggaagccataggaacttaaacgtaccgactataaagctctgagaaaagctgatgttttagaaagaccatacattctaggtacaaatacctaaaaactaaaaaataagtacgttggccaggcgggcggatcacgaagtcaggagattgagaccatcctgggcccctggtgaaaccccacctctattaaaaatacaaaaattagctgggcgtggtggcgcttgcctgtaatctcagctactctagaggctgaggcaggagatcgcttgaaccccggaggcggaggctgcagtgagccgagatcgtgccactgcactccagcctggtgacagcgagactcttgtctcaaaaaaaaaaaagtacattgctataagagaagtgcacacggatactagtagttaattcagtcacatctgtgaaatagcttataaaatgctacttttaaacaagctgtttttatgaaagggcttgtaaatgtttatggtatttaagctacctctctagccataacgtattatacattcaagaaaggttcaaaaccagatatactagaaaccaatctttattttttaccccactactaggtaagggcctggataccaagaagtgactgctcatctaatccataaagctatgttaacagattggaggtagtagcattttcattacaagtgactaaaagaacagctgtttacccctgatcgtgcagcagtgcttgctgttccttagaattttgccttgtaagttctagctcaagttggggggtggtgatagacatttaagaagccatatatcttttcagaagtaggtgtgatgtactaaaagtttgagacactttctagaagtctcactatttaagttatgactagtattggatttttggcatgtctttgggtttcatgtttcttaacccaactgcctgcagggccttatggctgtcaggagcagttcttgggaattaaagtaattactgaagaagtattctagtgagaaaatgaatttatgactcagaagcccctaaagacatgggtactaagcaacaaaataagcagatgttaattaactgtaattttctcttacagctgtttgcagacaaggtcccaaagacagcaggttggtccattttctaagtttaacaaagatgttccaattgtgacagtttgtgtgtgtgtgtgtatatatatatttttatgtatgtatatatgtgtttaatttttttttaaacagaaaattttcgtgctctgagcactggagagaaaggatttggttataagggttcctgctttcacagaattattccagggtttatgtgtcaggtacgaaatttactgaattttattttatttgggttgctcccttcatttgggattgagccagaatatttcaggatacacatatctgaactgttactctaccatttcggttctatttaacccttctattcagtttgaacttgggtttaaagtttgaaccttgcagatttggcacacttcatggttatgttgtcagaagtgacatttttcctatatgttgacagggtggtgacttcacacgccataatggcactggtggcaagtccatctatggggagaaatttgaagatgagaacttcatcctaaagcatacgggtcctggcatcttgtccatggcaaatgctggacccaacacaaatggttcccagtttttcatctgcactgccaagactgagtggtaagggtacaacatggcacactaaccacctgactaaatgaaaagttgccctggggggaacggaacaaacactacttttcttcaacctttgcttccacagactttttcatccctaagatactagaagaagagcatacataaatgacaaatatagccaatgtgatacagaatgtcagatactatgatagaaacttggcccttagctgggtggttgaattaggtgctacttttttgagatggagttttgctctgttgccaggttggagtgcagtggcacaatctgggctcactgcaacctctgcctcctgggttcaagcgattctcctgccttggcctcctgagtagctgagaatacagatgtgtgccagcatgcctggctaattttttgtatttttgtggagacggggtttcatcatgttggccaagctggtcttgaactcgtgacttaaggtgaaccacctgccttggccccccaaagtgctgggatttcaggcatgagccactgcgcccaaccaattaagtgcttttttttttttttttcttttctcagactggatctcgctcttatctcccaggttggagtgcagtggtgccatctcagctcactgcaacctcctcccgggttcaagcaattcttctgcctcagcctctcaagtagctggaactacaggcatgcaccaccactcccagctaaattgtgtattattagtagagcgggatttaccatgttgtccaggctggtctcgaactcctgggctcaagtgatctgcctgccttgacccccccgaagtgctgggattacaggcatgagccactgtgcccacccaattaagtgctgcttttatgttactattaataacatgcggttggttgggttttttgtttctttggggtttttgttttgttttgtttgtttttgggggaggggggcgcaattcattctatatgtgtaactcttttttgagatggagtttcgctctgtcgcccaggctggagtgcagtggcgcgatctcggctcactgcaagctccgcctcccaggttcacgccattctcctgcctcagcctcccgagtagctgggactataggcacatgccaccatgcccggctaattttttgtatttttagtagagacagggtttcaccgtgttagccaggatggtctcgatctcctgacctcgtgatccgcccgccttggcctcccaaagtgctgggattacaggcgtgagccaccgcacccggcctatatgtgtaactctttaatggtaattggagaatcatgtttaatgacatttagtacaaaaggcttcagttaaaaaaaaaaaaaaaaagctacctttctcgtcttggttcatgacacatggaggctgcttgtttgtggttgccagtcataatgattgttcttccttttcaaggttggatggcaagcatgtggtgtttggcaaagtgaaagaaggcatgaatattgtggaggccatggagcgctttgggtccaggaatggcaagaccagcaagaagatcaccattgctgactgtggacaactcgaataagtttgacttgtgttttatcttaaccaccagatcattccttctgtagctcaggagagcacccctccaccccatttgctcgcagtatcctagaatctttgtgctctcgctgcagttccctttgggttccatgttttccttgttccctcccatgcctagctggattgcagagttaagtttatgattatgaaataaaaactaaataacaattgtcctcgtttgagttaagtgttgatgtaggctttattttaagcagtaatgggttacttctgaaacatcacttgtttgcttaattctacacagtacttagattttttttactttccagtcccaggaagtgtcaatgtttgttgagtggaatatt

SEQ ID NO: 694 - DNA, 1779 bp, Homo sapiens
gcggcgggcgcaggatacgggccggggcgcgagccgagcgcagtctgccgggcagagcgggcggagcgagccgagtggggctgagcgcgccggcggcggcgggcggagcggagcgcggcgcgccggggccgccgccggggggatgcggctgcctccccgggccggggtgtagagagggcgggtccccggcctcgggagcacggcggtggaggggacataggaggcggccatggcgacccccggcaacctagggtcctctgtcctggcgagcaagaccaagaccaagaagaagcacttcgtagcgcagaaagtgaagctgtttcgggccagcgacccgctgctcagcgtcctcatgtggggggtaaaccactcgatcaatgaactgagccatgttcaaatccctgttatgttgatgccagatgacttcaaagcctattcaaaaataaaggtggacaatcacctttttaacaaagaaaacatgccgagccatttcaagtttaaggaatactgcccgatggtcttccgtaacctgcgggagaggtttggaattgatgatcaagatttccagaattccctgaccaggagcgcacccctccccaacgactcccaggcccgcagtggagctcgttttcacacttcctacgacaaaagatacatcatcaagactattaccagtgaagacgtggccgaaatgcacaacatcctgaagaaataccaccagtacatagtggaatgtcatgggatcacccttcttccccagttcttgggcatgtaccggcttaatgttgatggagttgaaatatatgtgatagttacaagaaatgtattcagccaccgtttgtctgtgtataggaaatacgacttaaagggctctacagtggctagagaagctagtgacaaagaaaaggccaaagaactgccaactctgaaagataatgatttcattaatgagggccaaaagatttatattgatgacaacaacaagaaggtcttcctggaaaaactaaaaaaggatgttgagtttctggcccagctgaagctcatggactacagtctgctggtgggaattcatgatgtggagagagccgaacaggaggaagtggagtgtgaggagaacgatggggaggaggagggcgagagcgatggcacccacccggtgggaacccccccagatagccccgggaatacactgaacagctcaccacccctggctcccggggagttcgatccgaacatcgacgtctatggaattaagtgccatgaaaactcgcctaggaaggaggtgtacttcatggcaattattgacatccttactcattatgatgcaaaaaagaaagctgcccatgctgcaaaaactgttaaacatggcgctggcgcggagatctccaccgtgaacccagaacagtattcaaagcgctttttggactttattggccacatcttgacgtaacctcctgcgcagcctcggacagacatgaacattggagggacagaggtggcttcggtgtaggaaaaatgaaaaccaaactcagtgaagtactcatcttgcaggaagcaaacctccttgtttacatcttcaggccaagatgactgatttgggggctactcgctttacagctacctgattttcccagcatcgttctagctatttctgactttgtgtatatgtgtgtgtgtgtgttggggggggtgagtgtgtgcgcgcgtgtgcattttaaaagtcataaattaattaaaacagatccacttcggtcaaaaaaaaaaagaaaaaaaaaaaaa

SEQ ID NO: 695 - DNA, 2385 bp, Homo sapiens; identical to SEQ ID NO: 67

SEQ ID NO: 696 - DNA, 1837 bp, Homo sapiens
ctcaaactcagctcacttgagagtctcctcccgccagctgtggaaagaactttgcgtctctccagcaatgcatctccttgcgattctgttttgtgctctctggtctgcagtgttggccgagaactcggatgattatgatctcatgtatgtgaatttggacaacgaaatagacaatggactccatcccactgaggaccccacgccgtgcgactgcggtcaggagcactcggaatgggacaagctcttcatcatgctggagaactcgcagatgagagagcgcatgctgctgcaagccacggacgacgtcctgcggggcgagctgcagaggctgcgggaggagctgggccggctcgcggaaagcctggcgaggccgtgcgcgccgggggctcccgcagaggccaggctgaccagtgctctggacgagctgctgcaggcgacccgcgacgcgggccgcaggctggcgcgtatggagggcgcggaggcgcagcgcccagaggaggcggggcgcgccctggccgcggtgctagaggagctgcggcagacgcgagccgacctgcacgcggtgcagggctgggctgcccggagctggctgccggcaggttgtgaaacagctattttattcccaatgcgttccaagaagatttttggaagcgtgcatccagtgagaccaatgaggcttgagtcttttagtgcctgcatttgggtcaaagccacagatgtattaaacaaaaccatcctgttttcctatggcacaaagaggaatccatatgaaatccagctgtatctcagctaccaatccatagtgtttgtggtgggtggagaggagaacaaactggttgctgaagccatggtttccctgggaaggtggacccacctgtgcggcacctggaattcagaggaagggctcacatccttgtgggtaaatggtgaactggcggctaccactgttgagatggccacaggtcacattgttcctgagggaggaatcctgcagattggccaagaaaagaatggctgctgtgtgggtggtggctttgatgaaacattagccttctctgggagactcacaggcttcaatatctgggatagtgttcttagcaatgaagagataagagagaccggaggagcagagtcttgtcacatccgggggaatattgttgggtggggagtcacagagatccagccacatggaggagctcagtatgtttcataaatgttgtgaaactccacttgaagccaaagaaagaaactcacacttaaaacacatgccagttgggaaggtctgaaaactcagtgcataataggaacacttgagactaatgaaagagagagttgagaccaatctttatttgtactggccaaatactgaataaacagttgaaggaaagacattggaaaaagcttttgaggataatgttactagactttatgccatggtgctttcagtttaatgctgtgtctctgtcagataaactctcaaataattaaaaaggactgtattgttgaacagagggacaattgttttacttttctttggttaattttgttttggccagagatgaattttacattggaagaataacaaaataagatttgttgtccattgttcattgttattggtatgtaccttattacaaaaaaaatgatgaaaacatatttatactacaaggtgacttaacaactataaatgtagtttatgtgttataatcgaatgtcacgtttttgagaagatagtcatataagttatattgcaaaagggatttgtattaatttaagactatttttgtaaagctctactgtaaataaaatattttataaaactaaaaaaaaaaaaaaa

SEQ ID NO: 697 - DNA, 1411 bp, Homo sapiens; identical to SEQ ID NO: 71

SEQ ID NO: 698 - DNA, 1798 bp, Homo sapiens
agacttgaacttgaatctcgaaccactgcatctccgactctgcccagactcttcactccgcggcaccctcaaaccccagcccaggccggggcgcacaagccagccagcgcacctgcagtcctcgcccggacgcgccgcgccccctcggaaccaggctctgctccgagcagccttcgcccctcaagccagccacagtccccgccaggccgggtgggcgtcaagatgaaggcggcccgcttcgtgctgcgcagcgctggctcgctcaacggcgccggcctggtgccccgagaggtggagcatttctcgcgctacagcccgtccccgctgtccatgaagcagctactggactttggttcagaaaatgcatgtgaaagaacttcttttgcatttttgcgacaagaattgcctgtgagactcgccaacattctgaaggaaattgatatcctcccgacccaattagtaaatacctcttcagtgcaattggttaaaagctggtatatacagagcctgatggatttggtggaattccatgagaaaagcccagatgaccagaaagcattatcagactttgtagatacactcatcaaagttcgaaatagacaccataatgtagtccctacaatggcacaaggaatcatagagtataaagatgcctgtacagttgacccagtcaccaatcaaaatcttcaatatttcttggatcgattttacatgaaccgtatttctactcggatgctgatgaaccagcacattcttatatttagtgactcacagacaggaaacccaagccacattggaagcattgatcctaactgtgatgtggtagcagtggtccaagatgcctttgagtgttcaaggatgctctgtgatcagtattatttatcatctccagaattaaagcttacacaagtgaatggaaaatttccagaccaaccaattcacatcgtgtatgttccttctcacctccatcatatgctctttgaactatttaagaatgcaatgcgggcaacagttgaacaccaggaaaatcagccttcccttacaccaatagaggttattgttgtcttgggaaaagaagaccttaccattaagatttcagacagaggaggtggtgttcccctgagaattattgaccgcctctttagttatacatactccactgcaccaacgcctgtgatggataattcccggaatgctcctttggctggttttggttacggcttgccaatttctcgtctgtatgcaaagtactttcaaggagatctgaatctctactctttatcaggatatggaacagatgctatcatctacttaaaggctttgtcttctgagtctatagaaaaacttccagtttttaacaagtcagccttcaaacattatcagatgagctctgaggctgatgactggtgtatcccaagcagggaaccaaagaacctggcaaaagaagtggccatgtgaagagggacactcaggacactttacgggatcaaagtgggtctacaccagtgctgcttcctgaatgtttgtgtgtgaacccttgtttcctccaaaacaaacgacagcaacgaaaactccttaatcagaacactgatccaatgaggaatggagcttgtttctgtgacccaggagaacttagtgcaagactacaggagttaacagatggccagctccttattttttaatgtagaataactcctgagtttatatcaaatcctgaagaaataagcctcagttttccatctgtttttgataagaataagaaagggagtgagtgtgaagatggtggttagcagtttcg

SEQ ID NO: 699 - DNA, 3292 bp, Homo sapiens
cggagggagcgctgggagcgagcaagcgagcgtttggagcccgggccagcagagggggcgcccggtcgctgcctgtaccgctcccgctggtcatctccgccgcgctcgggggccccgggaggagcgagaccgagtcggagagtccgggagccaagccgggcgaaacccaactgcggaggacgcccgccccactcagcctcctcctgcgtccgagccggggagcatcgccgagcgccccacgggccggagagctgggagcacaggtcccggcagccccagggatggtctaggagccggcgtaaggctcgctgctctgctccctgccggggctagccgcctcctgccgatcgcccggggctgcgagctgcggcggcccggggctgctcgccgggcggcgcaggccggagaagttagttgtgcgcgcccttagtgcgcggaaccagccagcgagcgagggagcagcgaggcgccgggaccatgggctgggggagccgctgctgctgcccgggacgtttggacctgctgtgcgtgctggcgctgctcgggggctgcctgctccccgtgtgtcggacgcgcgtctacaccaaccactgggcagtcaaaatcgccgggggcttcccggaggccaaccgtatcgccagcaagtacggattcatcaacataggacagataggggccctgaaggactactaccacttctaccatagcaggacgattaaaaggtcagttatctcgagcagagggacccacagtttcatttcaatggaaccaaaggtggaatggatccaacagcaagtggtaaaaaagcggacaaagagggattatgacttcagtcgtgcccagtctacctatttcaatgatcccaagtggcccagcatgtggtatatgcactgcagtgacaatacacatccctgccagtctgacatgaatatcgaaggagcctggaagagaggctacacgggaaagaacattgtggtcactatcctggatgacggaattgagagaacccatccagatctgatgcaaaactacgatgctctggcaagttgcgacgtgaatgggaatgacttggacccaatgcctcgttatgatgcaagcaacgagaacaagcatgggactcgctgtgctggagaagtggcagccgctgcaaacaattcgcactgcacagtcggaattgctttcaacgccaagatcggaggagtgcgaatgctggacggagatgtcacggacatggttgaagcaaaatcagttagcttcaacccccagcacgtgcacatttacagcgccagctggggcccggatgatgatggcaagactgtggacggaccagcccccctcacccggcaagcctttgaaaacggcgttagaatggggcggagaggcctcggctctgtgtttgtttgggcatctggaaatggtggaaggagcaaagaccactgctcctgtgatggctacaccaacagcatctacaccatctccatcagcagcactgcagaaagcggaaagaaaccttggtacctggaagagtgttcatccacgctggccacaacctacagcagcggggagtcctacgataagaaaatcatcactacagatctgaggcagcgttgcacggacaaccacactgggacgtcagcctcagcccccatggctgcaggcatcattgcgctggccctggaagccaatccgtttctgacctggagagacgtacagcatgttattgtcaggacttcccgtgcgggacatttgaacgctaatgactggaaaaccaatgctgctggttttaaggtgagccatctttatggatttggactgatggacgcagaagccatggtgatggaggcagagaagtggaccaccgttccccggcagcacgtgtgtgtggagagcacagaccgacaaatcaagacaatccgccctaacagtgcagtgcgctccatctacaaagcttcaggctgctcggataaccccaaccgccatgtcaactacctggagcacgtcgttgtgcgcatcaccatcacccaccccaggagaggagacctggccatctacctgacctcgccctctggaactaggtctcagcttttggccaacaggctatttgatcactccatggaaggattcaaaaactgggagttcatgaccattcattgctggggagaaagagctgctggtgactgggtccttgaagtttatgatactccctctcagctaaggaactttaagactccaggtaaattgaaagaatggtctttggtcctctacggcacctccgtgcagccatattcaccaaccaatgaatttccgaaagtggaacggttccgctatagccgagttgaagaccccacagacgactatggcacagaggattatgcaggtccctgcgaccctgagtgcagtgaggttggctgtgacgggccaggaccagaccactgcaatgactgtttgcactactactacaagctgaaaaacaataccaggatctgtgtctccagctgcccccctggccactaccacgccgacaagaagcgctgcaggaagtgtgcccccaactgtgagtcctgctttgggagccatggtgaccaatgcatgtcctgcaaatatggatactttctgaatgaagaaaccaacagctgtgttactcactgccctgatgggtcatatcaggataccaagaaaaatctttgccggaaatgcagtgaaaactgcaagacatgtactgaattccataactgtacagaatgtagggatgggttaagcctgcagggatcccggtgctctgtctcctgtgaagatggacggtatttcaacggccaggactgccagccctgccaccgcttctgcgccacttgtgctggggcaggagctgatgggtgcattaactgcacagagggctacttcatggaggatgggagatgcgtgcagagctgtagtatcagctattactttgaccactcttcagagaatggatacaaatcctgcaaaaaatgtgatatcagttgtttgacgtgcaatggcccaggattcaagaactgtacaagctgccctagtgggtatctcttagacttaggaatgtgtcaaatgggagccatttgcaaggatgcaacggaagagtcctgggcggaaggaggcttctgtatgcttgtgaaaaagaacaatctgtgccaacggaaggttcttcaacaactttgctgcaaaacatgtacatttcaaggctgagcagccatcttagatttctttgttcctgtagacttatagattattccatattattaaaaaaaaaaaaaaaaaa

SEQ ID NO: 700 - DNA, 810 bp, Homo sapiens; identical to SEQ ID NO: 74

SEQ ID NO: 701 - DNA, 696 bp, Homo sapiens; identical to SEQ ID NO: 75

SEQ ID NO: 702 - DNA, 2032 bp, Homo sapiens
ctggttcggcccacctctgaaggttccagaatcgatagtgaattcgtggaagagaccatatttgttcgcagaggaagccgttgctttctgggatctggctacggcagaaaagacatcggctccaacaggggtgttccacagggtagctgggagttggaagagccaagaacgcctccgagctctggatttgagcttctctgcccatgggtgaagcgcccatgctcagcttgtgagcttcttcccgggagagcagccatggcactgaggaatgtgccctttcgctcagaggtcctgggctgggaccccgacagccttgctgactatttcaagaagctcaactataaggactgtgagaaggcagtgaagaagtaccacatcgatggggctcgcttcttgaacctgacagaaaatgacatccagaagttccccaagctccgggtgccgattctcagtaagttaagtcaggaaatcaacaagaacgaagagaggaggagcatcttcacacgcaaaccccaagtcccgcggtttcctgaagagacagaaagccacgaagaggacaatgggggttggtcgtcctttgaagaagacgattatgaaagtcccaatgatgaccaggatggggaggatgatggagactatgagtcccccaatgaggaggaagaggcacccgtggaagatgacgcggattatgagccgccaccctccaatgacgaggaagctctgcagaactccatcctgcctgccaagcctttccccaactccaactccatgtacatcgaccggcccccctctgggaaaaccccccagcagcctcctgtgcccccccagagaccgatggccgccctcccgcccccaccagccggccggaatcactcgccactgcccccaccccagaccaaccacgaagaacccagcagaagcagaaaccacaaaacggcaaagctccctgctccttcaatagacagaagcacgaaacctcccctagatcgttcattagctccgtttgatagagaacccttcacactaggaaagaaaccaccattttctgacaagccctcgattccagcgggaaggtcactcggggagcatttacccaagattcaaaagcctcctttaccaccgaccacggaaagacatgaaaggagcagccccctgccagggaagaagccacctgtgccaaagcatggatggggaccagacagaagagagaatgatgaagatgatgtgcatcagagacctttgccccagccagcactacttcctatgagctccaacactttcccttcaagatctactaagccaagtcccatgaaccctctcccatcctctcacatgcctggagcattctcagaaagtaacagcagttttccacagagtgcctccctgccaccatacttctctcaaggccctagcaacagaccacctatcagagccgaaggcagaaacttccccttgccacttccaaacaaacctcggcccccatcccccgcggaggaagagaattcattaaatgaagagtggtacgtttcttatattacccgaccagaggcagaagctgctcttagaaagataaaccaggatggcacatttctggtcagagacagctctaaaaaaacaacaaccaatccatatgtcctcatggtgttgtacaaagataaagtttacaacatccagatccgttatcagaaggaaagtcaagtttacttgttgggaactggactccgagggaaagaggactttctgtctgtgtcagatattattgactacttcaggaaaatgccacttctgctcattgatgggaaaaaccgaggttccagataccagtgcacattaacgcatgctgcagggtacccatagcaagttatagccgagcaaatgaaccgtcctcctgcctctgttgccaacacgagatcaatcagccttggtcaatggacaaacacttaggactgaactgaacccctccccatgaacacaagggttttatcctttcctttaaaaacagtgtttgaaatgaagactgtcaactatcccc

SEQ ID NO: 703 - DNA, 1976 bp, Homo sapiens
ctgtttaaagacaaaaaggccccaaaaaggagggatggcacgaaacaccctccaatatgggcatggagtctagagtgacaaagtgatcaaaagttcatttcctatggggtgtccgaatgtacttaataataaaaagagaacaagagccatgcaaactgagagggacaaagtagaaagagtagcagacaccaagcaactaagtcacagcatgataagctgctagcttgttgtcattattgtatccagaacaacatttcatttaaatgctgaagaatttcccatgggtccccactttcttgtgaatccttgggctgaacccccccgtcctgagtggttactagaacacacctctggaccagaaacacaagagtggagtaacacacactgcaaagctgtgcttccttgtttcagcctgtgaatcctcaccttgtttcccatctagcctatatttttcaaactaacttggccatagaatcatgtcgtatttagggtggaagctgccccaggtctagcgcgtcatttaacagatgaggaaatggaagcttgggcagtggaagtatcttgccgaggtcacacagcaagtcagcagcacagcgtgtgtgactccgagcctgctccgctagcccacattgccctctgggggtgagtatgtcttcacatcctccaatacccctaatgacagacaaacagaacatggcaaagcctcagctctgcatggtgaaagtaagaaccagcaattgccacaaacagaaatacagtgttggtccggcagcctccgggggttctgcacaagtggattaccagtgaatacaaggctatctatcttccgaaaaaccaaagttgtatttatgctatctattttctataaaattttatattaatttacttgtcctatttttgaactctttcaaaagcacactttatatttcccctgcttaaacagtcccccgagggtgggtgcccaaaaggctctacacttgttatcattccctctccaccacaggcatattgagtaagtttgtatttgggtttttttaaaacctccactctacagttaagaaaactaaggcacagagcttcaataatttggtcagagccaagtagcagtaatgaagctggaggttaaacccagcagcatgactgcagttcttaatcaatgccttttgaattgcacatatgggatgaactagaacattttctcgatgattcgctgtccttgttatgattatgttactgagctctgttgtagcacagacatatgtccctatatggggcgggggtgggggtgtcttgatcgctgggctatttctatactgttctggcttttcccaagcagtcatttctttctatcctccaagcaccagcaattagctttaccttttcagcttctagtttgctgaaactaatctgctatagacagagactccggtgaaccaattttattaggatttgatcaaataaactctctctgacaaaggactgctgaaagagtaactaagagtttgatgtttactgagtgcatagtatgtgctagatgctggccgtggatgcctcatagaatcctcccaacaactcatgaaatgactactgtcattcagcccaatacccagacgagaaagctgagggtaagacaggtttcaagcttggcagtctgactacagaggccactggcttagcccctgggttagtctgcctctgtaggattgggggcacgtaattttgctgtttggggtctcatttgccttcttagagatcacaagccaaagctttttattctagagccaaggtcacggaagcccagaggacatcttgtggctcgggagtagctctctgctgtcttctcagctctgctgacaatacttgagattttcagatgtcaccaaccgccaagagagcttgatatgactgtatatagtatagtcataaagaacctgaacttgaccatatacttatgtcatgtggaaaatttctcatag

SEQ ID NO: 704 - DNA, 1813 bp, Homo sapiens
ccgtccccggcggccccatgccccgatgccccgcgggggccatggacgaggggcccgtggacctgcgcacccggcccaaggccgccggactcccgggcgccgcgctgccgctccgcaagcgcccgctgcgcgcgccctccccggagcccgccgctccccgcggcgctgcgggccttgtcgtccccctggaccctctgcgcggcggctgcgacctgccggcggtccccgggcccccccacggcctggcccggccggaggcgctttactaccccggagccttactgcctttgtaccccactcgggccatgggctccccgtttcctctggtgaacctgcctacacccctataccccatgatgtgccccatggaacaccccctttctgctgacatcgccatggccacccgtgcagatgaggacggagacacgcctctccatattgctgtggtgcagggtaacctgccagctgtgcaccggctggtcaacctcttccagcaggggggccgggagctcgacatctacaacaacctacggcagacaccgctccacctggctgtgatcaccacattaccgtctgtggtccggctcctggtgacagctggtgccagccccatggcgctggaccgccatggccagacggccgctcacctggcgtgcgagcaccgcagcccgacctgcctgcgagccctgctggacagcgcagctccgggcacgttggacctggaggcccgcaattatgacgggctcaccgccctgcacgtggcagtgaacaccgagtgccaagaaaccgtgcagctcttgctagagcgcggtgccgacatcgacgcagtggacattaagagcggccgctccccgctcatccacgccgtggaaaacaacagccttagcatggtgcagctgctgctgcagcacggcgccaacgtgaacgcgcaaatgtactccggcagctccgccctgcactcagcgtccggccgcgggctcctcccgctggtgcgcacgctggtccgcagcggcgctgacagcagcctcaagaactgccacaacgacacgccgctcatggtggcgcgcagccgcagggtcatcgacatcctgagggggaaggccacccggcctgcttccacctcccagccagacccctcccctgaccggagcgccaacacctcccccgagagcagcagccgcctcagctccaatggtcttctctccgcatcaccatcctcctcaccctcccagtctccccccagggacccccctggattccccatggctcctcccaatttcttccttccttccccatctccacccgccttcctgccctttgctggggtcctccgaggccctggccggccggtgcccccctccccagctccaggaggcagctgagggggatgggggggcagatcttggactcatgaggaggggcccccctgcccagaggggtcaacccttctggaaactgtgaagatctgacttcgcccccccccccccccatcttcgggaccaggatttgcacagaagcacatgcacctacccatacaccccctcttctgagcgtccctgttcccccatctcgctccctcccaggactctgaccccagcattctcaggcaccagtccctgtccggaatgccacccacatcttccatttccatgtcccctcccagagctggtggacccagggaacagccactcccctccactctctaccagataactgaggaggggagaggtgggccgtaacgggcacggatcacgatgtaaattattaagcattttggttggatttcttttgtaataaactatttttgtaccat

SEQ ID NO: 705 - DNA, 2439 bp, Homo sapiens; identical to SEQ ID NO: 79

SEQ ID NO: 706 - DNA, 2510 bp, Homo sapiens
cgcgcccgctatcctggctccgtgctcccacgcgcttgtgcctggacggaccctcgccagtgctctgcgcaggattggaacatcagttaacatctgaccactgccagcccaccccctcccacccacgtcgattgcatctctgggctccagggataaagcaggtcttggggtgcaccatgatttcaccattcttagtactggccattggcacctgccttactaactccttagtgccagagaaagagaaagaccccaagtactggcgagaccaagcgcaagagacactgaaatatgccctggagcttcagaagctcaacaccaacgtggctaagaatgtcatcatgttcctgggagatgggatgggtgtctccacagtgacggctgcccgcatcctcaagggtcagctccaccacaaccctggggaggagaccaggctggagatggacaagttccccttcgtggccctctccaagacgtacaacaccaatgcccaggtccctgacagcgccggcaccgccaccgcctacctgtgtggggtgaaggccaatgagggcaccgtgggggtaagcgcagccactgagcgttcccggtgcaacaccacccaggggaacgaggtcacctccatcctgcgctgggccaaggacgctgggaaatctgtgggcattgtgaccaccacgagagtgaaccatgccacccccagcgccgcctacgcccactcggctgaccgggactggtactcagacaacgagatgccccctgaggccttgagccagggctgtaaggacatcgcctaccagctcatgcataacatcagggacattgacgtgatcatggggggtggccggaaatacatgtaccccaagaataaaactgatgtggagtatgagagtgacgagaaagccaggggcacgaggctggacggcctggacctcgttgacacctggaagagcttcaaaccgagatacaagcactcccacttcatctggaaccgcacggaactcctgacccttgacccccacaatgtggactacctattgggtttcttcgagccaggggacatgcagtacgagctgaacaggaacaacgtgacggacccgtcactctccgagatggtggtggtggccatccagatcctgcggaagaaccccaaaggcttcttcttgctggtggaaggaggcagaattgaccacgggcaccatgaaggaaaagccaagcaggccctgcatgaggcggtggagatggaccgggccatcggccacgcaggcagcttgacctcctcggaagacactctgaccgtggtcactgcggaccattcccacgtcttcacatttggtggatacaccccccgtggcaactctatctttggtctggcccccatgctgagtgacacagacaagaagcccttcactgccatcctgtatggcaatgggcctggctacaaggtggtgggcggtgaacgagagaatgtctccatggtggactatgctcacaacaactaccaggcgcagtctcctgtgcccctgcgccacgagacccacggcggggaggacgtggccgtcttctccaagggccccatggcgcacctgctgcacggcgtccacgagcagaactacgtcccccacgtgatggcgtatgcagcctgcatcggggccaacctcggccactgtgctcctgccagctcggcaggcagccttgctgcaggccccctgctgctcgctctggccctctaccccctgagcgtcctgttctgagggcccagggcccgggcacccacaagcccgtgacagatgccaacttcccacacggcagcccccccctcaaggggcagggaggtgggggcctcctcagcctctgcaactgcaagaaaggggacccaggaaaccaaagtctgccgcccacctcgctcccctctggaatcttccccaagggccaaacccacttctggcctccagcctttgctccctccccgctgccctttggccaccagggtagatttctcttgggcaggcagagagtacagactgcagacattctcaaagcctcttatttttctagcgaacgtatttctccagacccagaggccctgaagcctccgtggaacattgtggatctgaccctcccagtctcatctcctgaccctcccactcccatctccttacctctggaaccccccaggccctacaatgctcatgtccctgtccccaggcgagccctccttcaggggagttgaggtctttctcctcaggacaaggccttgctcactcactcactccaagaccaccagggtcccaggaagccggtgcctgggtggccatcctacccagcgtgcccaggccgggaagagccacctggcagggctcacactcctgggctctgaacacacacgccagctcctctctgaagcgactctcctgtttggaacggcaaaaaaaaatttttttttctctttttggtggtggttaaaagggaacacaaaacatttaaataaaactttccaaatatttccgagg

SEQ ID NO: 707 - DNA, 742 bp, Homo sapiens
ccagccgcttcccatcccttcccccatcccctaaaaagtttgatgaccgcaaaggaaaccgaaaaaaagttgtcttgccccagtcctggcgggccatcagcatctcttttgttcgctgcgaacccacagtcccccgtgacgtcacccgggagcccgggccaatcgggcgcggtcggctgcggcggccggcgggcgggcgggtggggtggggcggggcggggacagcccggcgggtctctcctcccccgcgccccgggcctccagaggggcgggagggccgtcccatataagcccggctcccgcgctccgacgcccgcgccggctgtgctgcacagggggaggagagggaaccccaggcgcgagcgggaagaggggacctgcagccacaacttctctggtcctctgcatcccttctgtccctccacccgtccccttccccaccctctggcccccaccttcttggaggcgacaacccccgggaggcattagaagggatttttcccgcagttgcgaagggaagcaaacttggtggcaacttgcctcccggtgcgggcgtctctcccccaccgtctcaacatgcttaggggtccggggcccgggctgctgctgctggccgtcctgtgcctggggacagcggtgccctccacgggagcctcgaagagcaagaggcaggctcagcaaatggttcagccccagtccccggtggctgtcagtcaaagcaagcgtgagtactgaccgcggg

SEQ ID NO: 708 - DNA, 92794 bp, Homo sapiens
gatccacaggatcgggaggggaggagtcaggagacactgccgaagaatgggacttggagttggggaaatgcggtgacctcccccagttcccctgcctgctgccctcctttgttgggcatctggtcgaccctcttgcccccacctgccctagatccttgaaatattttcctcagacttctagaccccacatacctcccacctgtccttcagtgattgatgctcaccccctgcctccagagaaaacagaatcgccacctgcccacgctgcttccaccctccctgccttctccacacccactccggtaatgattccatcttcaggctccatctcaacaggatctttcccacacggatggatcaatcataagtcaatctgtcttctttaaagaaaatccttaacccaacctcaccttggcctcattacctccagaccacccgctaatgatggctgcttcccccctcccaggcattccaccacctgccccagctctgccccctacccctgccccacacacacccgccaccctaggaggtaggtgatgtgaccaccccattgaaagggtagggacgtcgggaaaatatggttgggcacagtggaactagagtttgttccctgtccatccgactccacgagggagaataaaatacgtgtcaagtgctcagaacagcgcctgcggtcaagcactcagtaggtgatatatactgataacataatctgggtggttttaagagcctgcgctccagcccggacacccaccccacccagcccaaggcaccttcctgagcacaggtctgcctgtcccttccccagctcaaaatctttggctctggatggtccaggacactgagcaccaaaatggccttctgtgatctggccctcctgggactctccaaattcattcccccctgctcccctccctgtagatggagaccttccaggcaggtcagacaaactgctgcccccaagtgtagccactgcatctttttcttttttcttttctttctttttttttttctttttcttttttttctctttttttgagacggagtctcactctttgcccaggccggagtggtgcagtggtgtgatcttggctcaccacaacctctacctccggggttcaagcgattctcccgtctcagccccctaagtagctgggattacaggcgccgccaccacgcctggctaattttttgtatttttagtagagacggggtttcaccatgttggcaaggctggtctcaaactcctgacctcaggtgagccgcccgcctcggcctcccaaagccaccgcatcttggtccctgccattcccttagcctggggtgccggctcatcttttccctctaggatttctttagactcagcatatcttgcaaatgtccactaggtggtgctcactcatcgccagcagggagctaacaagccgctcctggggttgggagggcggaggtgccccacagcggggctgacagcctcagcggtcctcttcagcctccagggagccaaccacaggcctgcgtgactctccctgtcatctgcaccctctctggggtcctctgcccatccagccacccgcacagatctgtgtcagtccctgccccccaacactgatcccctcctcccagccctaccccagcctggcactcactggttcttctccagctcaagcaggagctcctggccttcagcctccagggccaccagccccatgtctggcttcgagacctgggcaagaaaatgtgtggagctgagatggtggcctccaggcctcctgcctgccagggagtaggtggcctgtggagccggctggggaggaagttcttggggagaacgtgggctggggagtcagcaggaccccccacatactatggagggcgtggaggaggtgagaacatacaaagatgttcccaaactcaggatgtttgcagtcctgacaacagccacttggaagggcgttggcacagcctgccaggcacaccagcatcctccctagagaccagaggtcccagaaaggtgcccctcccctggcccgccctcttctttcatgcccagaaggggcatcaaaagcaggggaagacagaggggtgctgaggacattatgggggcatcgggtagccatggtcagggcctcctcagagcctctgctacctgaggcttgtttccaaatgagctgctgctcattccctatagaattcaaatttgactcctccacttccaattttggcaaactgctccctcttccaaagttttcctgggcctccagcagcccccgtccctccggctccgacacctgcttcactggacccacgaagtaaacatggacgccattccagccaagagagcacactggctctcagctaggtgtcaggaggctggcttggacggccagccctctctccttcccccaccctcttggcgtctcccaccctgtgggaacaccccacttcccccttgtccactcagcctggctgggggcccagagttggagccggcccaggagcttcctgggaggctgctgcgccttcggaatgtttaacccccgactccttttctccaaaaatgcactggcctggggccctgtccaagggtctcagagtctttggagggagttcttccttcgcaagtggggagcagatggtccttgcctccctggccacaggccccacaaggcctccagcatgagctcatgaggctggaatgccacttgctttattggggaaaggtctgcaccgggaaaaaggccatactcgaggtccctgttcctctgcagcccctgctatctttactcttgccctcctggtaccctgccccttgatatatacccctcatcttgaaatgtgagtgtttcctgccttttggaggggacacctagcctctactctttcttctgtaccatcttggcaggcttcctgggggcaggggcccaccggtgggggaagcagagcccctttggggctctcctcttggtcacagcccaggccagacagacagggaggcccagaggcagagtgaccccagtgtgtgtccagccttcccctcctggggatggggagggcaatctcaaagctcaggccagtgccgtgcttgaccagtggaatgggggccttatgggcctaggggatcccagtgagggccctgggttgggagctgctgggtctctgggggcctctcagccttcatggcaatgctcccctgccttccctcttgctggatttggacagtagggctgaaaattccaaacaaagagggctctctaggaggggcaggggtgtagccaatggtttaaaatcgttcagaccttagtgggtctcaggctcccagcctaaagagctgtgtgaccatggacaatttccccaagctctctgggcttccgtttgcccctctgtaaaatgagcatatcaaggctactgccctcttagtttgcagcacagatattatggcacaaacagatggggcatggttattctggaagcgtgtgaagagcgggattgggaagaggctggggcagagcgtcctgcagaagaagcacatggggtggtcttacatctgggggacatcaggagagtgaccactgcccccccgataccagaagtggattccacaggagccagtgaggctgaaggttcaggccttcgtggcagggccctgagagggacagcagtgtgtccacagggtcacatgttctggtcaactttgcaaaaggttttctttttggtgcttttttttttttttttttagaggctcctgaaaagcttcaggacccacaaactctggacccatttctgcctggtgggggtgggggtggcccagatcatccagggagggagggaaagagggaggtggggtggagaaagctgaaatgacttccatgtgtgcgggctcacgagatccagatgtccaaaccccagtgccttcttctgcccacttgaggggcaggggaggcaggggcctataggagtagtgacttggtggttctggggaccccagcaaaactagaagctgtaatgtagggagagacaaaagggctgggaggttcagggcccctgtggagggcggggagacatggcactgaccggctcctccaggctgacggtgcgccagggttgtccatccaggacccagtgcggggtgactggctgcccagggatatgtcctggagtaaagacagagcacagggtgagggggacctgaggaacacaggggcatgggacaaagcagagggaggggggtagaggacatccccagggaggcactggaggccttttggggcagacttcaccttcaacacgcgtgggctcagcctggagaaggagggacgcccgtgggcatccttggatctgaggagctatcaaggaggaggaaaagagaaggctggaaagggacagctcagctggggacacgggagtcccctgacctttgtcggggggcaggcttgggctcggcgatcacaaggaagaggccaaggccgccagtgcagaggggaaggaaagagcgcggcagccttagggatttttagatgggcagcagatgcctttagggtgagagatgtacgaagagaggacacttgtgccccccccatcatctgagaaaaacaacagccagatgttgccttgcgaggtccaccttgcccagagctccctcggggactctgtcctggtggcagggttttggtaccctggcccagaaggcccctcctcatctcttcaaggggaggggacgcttctggacggagccttggtgctccctggccgggtgtgcctaagggggctctaggaggaatcccagagccaagcattactcagagggcgcctggaatgttcccctggaatgctcccagccctccactggccccaaccactctcacaggcccgccctgcaggagccaggccccaggcacccagagcctgcagcagccctccttcccccggtacccagtcccagctcccagaacagacagcctcccccctccacgcagccctggcctcagtcctgctgggctgatggctgcctgtggaagtgactcagctcctgctaggccaccccaactccttttttctcctccaccttctctcccagactacaaacatcaaagacccttcctccaagaagccctccttgattggatgagtgaattgccatcaggcagatgagggccgagaggagtctgccaccttggaaaggaggctagaggggccagtgcagggagggctctgagtggatgtgggggaggggaaggaggggaggtctctcagcccagagagcacttaactgagagtagagaaccaagctttgctgctcctaggcctctaagggtttggggaagaggtagggtgggcccgggcacaggtgtggtgtgggtgcagtgtggtgtgtgggtgctgtccacatggccttgcgcgcacgtgctggccacgggcaccctgaccccaatgagggagagaggggcagagctggagctggagctggagctccggtgaccgggtgaatgggggtggaacccgagggagccaggctggtattgggcacatagacgcccctctcccaggggtcccatcacctcccctgaccccaggatagggctcagaggggagggagcagtggaccgcctggggccctcccctggggccagaacagaccaggcccctgtacctgtttggtccccacacagtgctgtggaagccaccgcccagtctgcatagcacagcccagccccgcatgccccctccctggttgccctccctgttcccggccaggcacttgctgtgcaggactggctaatcctcccacccgcttgcagaggttgttccagccccatcttaacatctttgtttggaggggttaccccgaggagacagctgcagtcttcccagagcactgctaaacagacaccttctatctggagaggcccttctctatctcaccaaacaaggcaacaatataaacaacatacacactgccctgctgccctgggaggagggacgaggggtgagcagggtggaggccacagctagttctgcagcctgagagcaaagcagggactctgggggactcttgggcatgggggcttcctagaggacggagccccgctgagtcctaaggggtggaggagcaggagcgggtcacacggtggcctgcggatggaagctggttgtgagagcgagaatccaggaagagggggctacggctatgggctgggggctgggctgcccccgagggggagggagccatgccctctgctttgccagcggagtggcagccgggcagtgtgggcaagtccgggcccggggccagcccaagcacacttgagcgtccctgggcaggtcccacggagacccccccaaagagtccccacgccctgacctactggccgtatggtgccggggccgtgagaccctccgcgcgctgacccgagctctgagcagaacccatccccgccaccaccaccgcgcctagcctgcccctcagggcgcaccccgcccgcgtcctcaccttgaagcaccccggcgcctggcactggccagagcagcagcagtagtagcagcagcagcaacggggtcccccgagctctccggggcctccagcccatagctgtgagctcctcggcctctaggcagcggctcgcaactccggctccgcccaggctggattgcggccgacccgtgcccggtgcagcctcaggccgccgccttcggaccttcccgcccccacctcccaccgcccgccctcgctcccgcctcccctccccgccaaccccgctcggagcctggccaggggccccgacggcgcgcgccatgggggagccgggtcgccactcccggaccgccgcccctcgagggggtggagctgggcggaggagggaatccgtgcggcccctcggatgaccggcccgagccgtccctccccgtcggtctcagagggcctctactcctgagaggaggagagaaccgctgggaaggttcttggaggaccgcggcgtggtgggatgaggcggtgggcaaaggccgcctctcgctgctgaagttggccccaggagcgcgatcttccgtggtctcctggggccgatctctgtcccctccttgctacccgtcctgccccgagggtgccctggcggaggttgagtcgggtcatccacctgcactgggtgcccccaaggataggaaggttcaggcaaccggctgccgctgtcttgggggcttcattgctgggcaaaggcgatgcagcagacggagacaacctttcttccctggcggtggccagagggcagaattgcataaaagctgcagactcccaggcctgggagaccctttcggcctcagtaacatctgtttcatgttttaaacttttgttttcctactcggtgcaaatttggatgagatgttaactttttttttttttttttttttgagatggagtctccctctgtcgccaggctggagtgcagcggcgcgatcttggctcactgcaacctccgactccctggttcaagcgattctcctgcctcagcctcccgagtagctgggactacaggcgcgcgctaccacccccagctaacttttgtatttttagcagagacgaggtttcaccattttggccaggatggtctcaatctcctgatctcgtgatccacccgcctcggcctctcaaagcgctgggattacaggcatgagccaccgcgcccggccggagatgttaacttttaagcaaatcttttttttttttttttttttttgagacagagtttctctcttgttacccagactggagtgcaatggcatgatctgggctcactgcaacctctgcctcccagattcaagtgattcttctgcctcagcctcccgagtagctgggattacaggcattcgccaccacgcctggctaattttgtatttttagtagagatggggtttctccatgttggtcaggctggtctcgaactcccgacctcaggtgatctgcccgcctcggcctcccaaagcgctggaattacaggcgtgagacaccgcacccagcctacttttaagtaaatctatttgtttttgagaatttggaatgtagtaatttggttagtgaaagttcgagcagtgagagaaacctacattcacatatctcaaaatcaaaaagtacagaaagcatagggaaaagtctccgtgctcttagccctcctcaccaacaggaaaccaatatgattagtttctttcataggcttttagattattttttcacactcaagacaatacagacatatttttttctcttattaacgtttttctgcactttgattttcttttttttttttttggtcgcttaatacaccttagatatcagtgcgtttagagggtccttgttgttcttatgattattatttagagacagggtctcactctgtcacccacgctagaggacagtggcctgatcatgcctcattgcagccttgaaatcctgggctcaaggtatcctcccacctcagcctcctgagtagctggaactacaggcacacggcaccaggcccagctaaaatttttaatttttctgtagacaggggggtctcactttgtttcccaggctggtctcaaactcctggtcttggccaggcgcagtgtctcatgcctgtaatcccagcactttgggaggccgaggcgggcagatcactggaggtcaggagttcaagaccagtctggccaacatggtgaaaccccatctctactaaaaatacaaaaattagccgggcatggtggtgagtgcctgtagttccagctacttgggaggctgaggcaggaaaatcgcttgaactcagaaggtggaggttgcagcgagccgagatcatgccattgcactccagcctgggcaacaagagcgaaactccgtctcaaaaaataaaaataaaaataaaaagaactcctgatcttaagtgatcctcctgcctcagcttctcaaatcgctggaattacaggagtgagtcaccacagctgtccagctacgagattattacttattattactactttggattttcaaatcaacttcattaaggtataatttacacacaataaaatgcacttattttaagtggccagtaagatgagtttcgataagtgtatataactacataagcatcactataatgcagacacattccctcactcacagaaagagccctgtgcccttccagccaaacttgcccactcccaaccccagacagccactgatctgttgttctctgtctatagataagttttgcctgttctagaatttcatataaatggaatcatgcggcatgcactcttctgtgtctggcttccttccctctttccgatgtttttgagattcatttacactattttgcatatcaatagtttgttccttcgtattgctgaatagtgttcggtggtttgagggaaccacagtttctctactcaccagtgcaccatagggttattttccagttaggggctcttataattggaactatatttgcacagagagagagagaggaagaaagagggagagagatatttattatagcaattggctcacgtgattatggaggccaaaaagttcccgaatctgccatctgcaagctggagaacgaggaaagccagtggtgtgattcagtttgagttcaaaggcctgagaaccaggagcaccagtatggaggtggctcgagctcagaacaagttggggacaggaaagcagagcagcgccccagagcagcccctcagcgacacctcttcagtaaagcaaggctgaacacagaggggctggcttcagtgtggatgtcaggtacagaaggcagctcgaggagctactctggcgttcttgcttactggtattcttacctcgaactggccaactcctacttaaactgcaggccatggctttaatgtcctgtcattcagaggctgtcccttacccaaagccaggttagcatcccctgactgacacttctccctgcaacacgtttcagaaggccctgtagtcgtccacttccctgtctctctccccaagctcctgagctccatgtggtctgggaatatgtgtgttgctcacttcctagcacagtcagtgctaataactgactgtagaggggacacagtcgaaaagccacatggggatcagagtcatccttacacagttgacacctcccaaacccagatgagctgtgtccaagtgcaggtcagaggaattttctgccgaagtctctgagaaagggtttatttacattttgaggttgcaggggaggagatgaggccatcaaaccaaagctgaggaagagggatcctaggatgcaccgagcagctccgggggcgcctgacagcacctgggaaagatggcttctccactggcttgttggcgtcaccctccagaggggcatcaggaaatgtcctgggaaccaggcaaaccagtgagcattaacccttaggagtgcttggcatgggtgacacccaccatctgtaaacacgacttctcccaaggagtgacgcagaacaggatgtctgagggaggcactccgactccagccttcagagatcgccagggtggcacctggtgacgacaggctgatgcttgggtgccccggaaaaagtcatgtgtgtgaatgggggccccaaagccaacgcttcatccctgacagcctggtgcatttagaggggaactttttgtcccttggcaaggtgggtggaatttcaggttcatagggcaagggtattttagctttaatagatattgtcaaacagttttccaaagtcattgtacacactctgtgattctacttaagtaaagtttaaaaacaggcaaatcaaatctatggtgttcgaagtcaagacagtagttacccttgtgggggctgcaactggtacagagtgtaaggggggactgtaggatggtctatttcttgatctgggtgtgttcgcttttggaaaagtccttgagttgcatttataatgtgtgaacttttctgtatgttacactttaattgaatgtacaaaaagtctcaggaggcctcagaccactggaagcggacacaactaacccctctgagagcctccaatccaagatggacatatgtccccttggaagtatgcagaagcaggtgaagactcctaagccggatattcccaaatccccccagtagctgcagcttcagcagctgcttatggtcctccctacaccctctcttccccagacagcccccaaacatctggctgcatttgacttgctctctccctgtcccacctctggatttagtccatgttctccaccctccccactgtcagcaatgtagacaagacaaacgcttagttcacgtgcccacctactgcgtgccatgcacggggctggtcattgtgggtggcaaatgtgagcaacacacgaagcctcaaggagcagaaagggacacaaatcacttcagcgtaaggtaatttgtgataaatgtcatgtaacttgcagcccctggccccctcctacagatggtgtctaagaataaaccccactaacatgtgactcctctgttctagcccagctgtttgggttgcaagaaagagactcactccagttgcgtcataggatggagttttattgggaggacattctggacgggctcccagcaagagtctggcaatggagcatgaaaatgaatgagcctggaatgagggagggtgcggcctcggctacacaaagttcacccgcccccaactgcctcccagcgtgttagctcctgtggcaactccccacttctctctctgtttttcaacccaaatcctagagcagagggctcttcgctcctcacaccatctccaccaggctgcagggggagtcactagcccactcaagagctctctcctgttggtccctgattcgcaggggcacgtcattccttcttggtaactcattctctttaacagcccgacacagggtctccaggaaaaggacaggagctcacacagtcatgaacagagatgcatctggagcaggaataaggatgctgacaacatctgtgtctgccctccactcttgtaagggccagtaaggtagtacccagtccctgggggtagggggggtggtggtgggaatgagggcatctcttctttcaggggccaaatctggcacaaggatgtctgcttaggcaactccactgcctggcatgctctctccctaggaaaacaccaaaccttttttatttcctcagtcttagtgtgagagtgatcacctcttccaggaagcccacaaccagaatggccaggggcacaccctggccctcagtagatgggcactgagacaaaacatggcctgctggtggcattcccaacaatgtcaaaagtctcagggatgagctcacagttgggagtcctttggaagtccaattccaaatgtcctctggactcaaaataaaaactacatttcccagtctcccttgtagcttgcagtagccatgtgacaatactccagccaatgggaagtgagtggaaaagtcctgtgcagcttctgagttgcgtccaccatgggcatgggtgtgcttctacctccactcttccttcttctggctggagggcatgtggacaaagcggggccatggtgagcctcacaatcaaaggcatcattttagggatagagaaaaggaagatagaaggatcctgagccccaacatcataaaccatcgtaacagccagactagcgtgggagagaaaaataaaattctatcatgttgaagtcactgtatttggtctcttgttagagcaggctgactgatactctgttgaatacagaatgccttggtgagcctctgaggatgcaggatgctgcaatccaaccaaagtccagggtgactttcgaggagaaggatgtgaaagggcagggcttcctttgagggagaaatggagagaagggaggagatccagagaagagagagcgagatcagctcagtgctcttcagtgtcctccagggtcaacaccctcctgggcagacctctcaccacccatttttgggggggcaagaggcttggggccaggtcataaaaagtcagatgtcacagagctgttttcgtagaggcgggcaggactcaacactgcctcattcacattcataggctggagtcatcacagattctggccactttctcctccggagggcaggcaacaccactggtcagcccaggggtggggcacaggttgaggtctcacatgtggctgcatcaggatcaatgagcttcccacagagaaaaccctggtcacaggaggcctctgggagccagggcaggcccccaggcccccagcctcaggtggggtcccaagaggattggtgggagtgtgcatggctggaagtgtgacttggagccctggcctaccaggtgaatcagctgcagaagggacacaccacaggggaggagaaactgactttcacttctgcccaggtgacgggcaggcttgggagtggggaagaggcctcagaacaaaggtgggggagtcagaacatacgtgtcttggaaatggaggggatgctgccaagtccagaaagtctcccctagtcctctaagccagccgccagctgacacagggattccctctgccccgagcagaacagggctctcctatctcctgaggggctcctggttccctgcacactctccccaacctccccttggtcccaggcaccatcctctaaatgacagcagtctccagatgccagttggcactgtgggttagctgggtattatatctgcccgtgtgtgttgaatggatacctgcgtggtctctttctgaaaagccatctccaccgaattctcgcccatgctctgcttacaaacacgcctccttctgcaaggcccggagtggactcagagagcctctcccctccccacctcctgcccccattcctctcccgctccccacaggctggctccagaccacaagagcgtgggaacctcatggagagtgggtgcttcctctgtcttcctccctagcccttgctttagcacagccagggcagagaggaggaaagaaggaaactacagcaaggaggatttagggacaattctagaagggatttccaatttggaggggcagtctgggaagtaggcagcctgtgaacttaataggaggtcctaaaggacctgggggaatttggggagaagacgaggtgggctgccttaccccaatcttctggcccactcccagctccagacccacctccaggtgtagcaggcccccaggcccaacagcaggagcaggaggcccaccagcagtcccaggacccagagcagctgctggaactgatgcaggcggtgcagggctggaacacagagcgggactcagagcagccacagctgcaggcccccagtgcttccttccaaggggacccacccaagatgacaccttctaacttttgctttatcgctgaagctctccacacaagggtgccccgagcaatcagtttagagtcgacaggcaaatcatgctgcagcaggagggatacagggaaggaagcctttgggcctaagagctgggcttttgtgcagagtggcctgggagatggagccccctcccctcacctctgaccccaaagtaggtggaggtagaggcagagcccaggacatttgaggcagaacagatgtattccccttggtcgctgggcctcagcgcctcgatgtccaccctcagggcattgggggaagccaggacatggatgtgtggctctgcaggagcaccctggggctgactggaggccaccagtcgactgccaaggtggagagtcaggctggcgagcggctcgctgtccactcggcaatccaggatgccccggaggccaccctcaggctccacgaagaccatcatggtgggcgtcttgggagggtctgtggggaggaagggagtgtggtgattgcagacaatgaccacaaatttctccctccctgtacccatgcacagtgactttgctgctcctcccattaagaggcagaacctatttcctcactccttgaatctgtgactcagtttgaccaattgaagaaagaagtgatgttgtgcaacttcagagccagacctcaagaggccttgtagcttctgctctacttgttggaacacaacaatgtgggaagcccaggccagcctgctgggcacatgtggcccaactggcagccaggagcgtgcagtcatctgagaccactgggcaactgcagccacatgaggtgtgaacaacagaagaactccccagctgagcccagcccacagaattgagcagataacatgacttttgtttgaagcagtaagttttgttgtggtcaatagcaatagctgactgatacagtgtaggccttggtgaaggctggagtgggagaccaagactgatgagggcttatcgtgtgccagacacactcagcacgctttatttcttttggttttttctcttcttttcttttcttttttttttttttttcttgagacagagtctcagtctgtcacccaggctggagtgcgttgtggtgatcttggctcactgcaacctccacctcccaggctcaagtgagtctcctgcctcagcctcctgaatagctgggattacaggtgtgtgccttcatgccgtgctaattcttgtatttttagtagagacggagtttcgccatattgaccaggctagtcttgaactcctgacctcaagtgatccgcccacctcagcctctcaaagtgctgggattacaggcataagcccctgcaccagccatttatttcttatacaacttgcaggatgaggcgaatgatgtattccccattttacaaggtcacccaaccagacagcgggagagccaggattccaacccaggactcaatatccgtgaagccttcactcttggcagacagaagaggaggaagaactgaggtgggcgtgtgagatgtggggagactaaggcggaggagggggttcacactcacagagcacacggagcatgactggagcagaggcagcagccccagtggggagctcagccaggcagtggtacatcccagcttgagcacgagccacgtgggtgaaggcgagagtgggcacaggctccgcgtgcagccgccggtcattccagaaccatgcaaaggtggagttgcccacaggcccagggccacccaggaggcggcagctgaggttcagggcagcgccctcaggcacgtccaggccaggctctgccaccacgcgtgcacctgcgggcggaggatagagagatgattggggatctgtaggccttgggggctggagcctctgggtgggacctctgaggggcctctgcacattgtgggaaggtctcagtctgacttggtatagggctttccaaggtggaaccatgccccctccagtgggagctgtgccccctccaccagattaggcttctcaaggcagagctttctcagaccagacagcccgctctagtgggagctccagcccctctcgtggacttggacctgagagcatcagagcccctcctcctcccctctcttccactcaccttctacctgcaaccgcccgatggtgctgattgagcccagcaagttttgggctgtgcaaacataggtgtcatcacctgcaggcacatcttgcacctgcagccgtagggcgtttcgggccacctggacatggcctgtccctgatgccaagctgtggaccccgctgctcgtggccagcaccttgccatcatgagatagggccagctcagcaggtggctcactgtccacagtgcactgtatcacagccatggatctggccctggagtcccggaaggaggacaggacagcgtcctgaggggcatctgtgggcaggcagggcacagatggggaccttgcttaggcaccctgtactgctcattgcctagctgcctggggttggtcaggctgaggcctctggaccaatggccacttcctagaagtgacaccttcccaggagtcctgtgggcagagtgctccaggcagggcttataggactgtctctttctctagcacctatgtcctctttccccaactgcccattcctgggcccactgcagtcctttgcccactcccaccagagcccagaagcaccctccaccaccctcctcctgggcagccctggccaaggaccctctgctcacagaggacttgcagggcagcaggacgggagctgcgggtgccctgggcatcctgggcctggcaagagtaggcgcctgcatgagcccgcgtggccaccaggaatgagagtgaggcagctggaccctcctgcagccaacgaccgttgtggtaccaagtatagagtgtgggtgcgtgggcagcagggtccgcacaggtcactgtgatgggggcaccttcaggcacggcagcctccggagccaggatcacccgcacacctgtgccaaggaggccaggatcagccgggcccagccggacaccacagtgggcttccatcccagtgggcttggcctaggccctgccttaccctccagccgcagctccagggacgtgttggcctggcccagagggctgcgggcagagcagctgtagaaaccctcatccctgggctgtggccctcgcagctccaggcgcagggtgttggggacagaggctgctgtcgaggaggccaagaggcgaccggcgtggctgagggccagctgggcgggcgggcggctgtccacagtgcacagtaccagggccagctgcccgccatggctctccaggaggtaggtcaggcgcaggttgcggggcgcgtctgcagggcatgagaggcttacacggagtcacaggcagcagcctgcaggaggccagtttgcaggtggcattcaaactcaggagggccctggctccccacccctatggctcccaaccacccagtctgaggcactgctcctctgcccagacaggactcaccccagcgccccctactcttaatgctccttgcccagtgctccactagctactgggtaccgagttccccactggacacctgtcgggttccggccatgccgtgatccctgtgggcttctgtcattcctgtgagtcccaccctgcatccagccagactcacagaggacgtccaaggtgataggtctggagaggcggggtgcccgaccaggggggcccacaccgcagcggtaggaggtggcatccctgactgtgacgttgggcagggggatggagtgggcatccaggcgctgctgcccatcctggtaccatgtgtaggtgagctgggccgggtgagtggtccacacaaggcaggtcaggttcaccagctgcccctcccgcacggtagccccgggccacacctgcacattcacagctggggagagggagggcacaggacaccagtgagggtcttgaggctgtgtacagcaggccacctgtctccatgtgggtgagctactcctactgctggggagccccttggcctttgggagccttgggtggcccacctataaatgtggcttagaagtcaagcttgggaatagcccactggctcctgagtggtcccaagtagagttccacagagtcctggaaagccctgagcccctccctgaccctggctgggggcaaatggggagaccacagacctcccctcccctgctgcactttctcctgaaattccctgtttagttttatccactgggcatacttgtaaaatttggtgtttataaaaggttctcctaagaaactcaagtctggagtccaccatcgttaggaagggtgggaatggggactattcccgtgcccccaggcttctagaaccctgtcccacctcctctcctcttttaaaggacacacacacacacacacacacacacacacacacacacacactgaccttgagcgtcgaagtcagctgaggccgaggcctggcccagggtgttggaggcctcacagatatagacaccctcatcctccagcatagccccgtggatctccagacgcagtgtgttgggggccacagccacatgcagcctgggagagctgccttcgggtccccccacaccttgtagggtggaggccacaaggcgatccccgtggagcagccgcagctgggccggagggtcactgtccacacggcacaggaggaggcccagtcgtccagggcctgtgtccatcagggtagtgagtgtgacgtggcgtggggcatctacacagggtggggagtggtcaggacccagccaggggggtccctcatccagggctctgtcatgtgacacagcccaggactgggggactgcattccttcccccacacctggatgggacaaaagtccttacaggacacgtggaggctgatgggtgcagctaggctcgtggtggctgagcctggggcctgggcttggcaatgataggccccagcttgtgtcaaagttatggctgcaaagcggagcgtggccgaggtcgactcctggaggggctggccatcccgataccaacgatatgaggtcccctctgggactcctgtgtgtacctggcagctcaggaccacagcctggccctcttggagctcaggtgatggtgacacctggacccaggctcctgcaggggaaaaccaagagcaggtgagggctctccaccacacctctcacagtctgggaccatgtgcgtgtccacctaggactacacaacccaaccccatgtgctggagccgcagccccttccagaccaccgccagggcccactcagccctatgccttggcccctcctgctccccactctcctgcacaggctccatcctggcatttacctcccaccacctggtgggatggttttactgtgtcagtcatatctcgcctaccaaagcgtaagccttatgggcactggacttgtgtgacctgtaaccccagttccaggcactgtgcctgcatgtgttagctcctgacaaatgttggttcaacccataaagtactgaaaagggagggatttagatcatcccggggccattgtcctaactaggatctggactcagcatgggtgaccgagggcttggaagggaatgttagcagctatgttatcttgagcgctctcgccaggccagccctgcatccagactccaggccacaagagcacaggacctggggaccaggcaaagggcagctcctcagtggcccctgggtgtgaagcaggagaaccccaggttgcagggagtgagatggagggacagctggaatgctaagcaagaacacagaccatgcctgagaccacagctagcagggtcatgcaactggggaaaagctcctaaaactcaaaccttcaatttcttcctgcgaaataggtatgctaagtaagaaaagatacacagaaccaaggctcaaagtaaatgtcccaaaattggtgctgtcggtcaccgtggtggaagaaacactcatgttcctttgaccttcgcattatgggcattatctttcctttttcctggtttatttgtttagggagaatttttttttttttaagacagagtctcactctgtcatccaggctagagtgaagtacaattttggctcactgcaacctccatctcccaggttcaaacgattcgcctgccttagcctcccgagtaactgggattacaaatgcccaccaccacacctagctaatttttgtatttttagtagagtgttggccaggctggtcttgaactcctgacctcaagtgatccgcccgcctcagcctcccaaagtgctgggattacaggcatgagccatggtgcccggcctgagggaggatttttatagagactatatatatacacacacacaaacacacacacacacacacacacacacgtatgtgtatataaataaagaatatgaatatattatgcataagaatacacataatgtatatttgtatgtgtatatactcatacataaacatatatgcataatataaatatacatatgtatgagaatgtttactatgtaacaaaattatatgatcacaaaacaagttatttcagaaagtgctcccaccaagcaagccactctgtgaattgccattgcctcctagtggctgctgcagttattacaggtgaaaatatctagctggaggcaaagggaggccttctgctggctggaaactgcccttaccaggactgaaaaagacatatttctgcacaaaattcacagcacccagcccaaagtctgaccagagtagtccccagggcatcagagtctaccatatcttcagaagactgacactcacctcggacctggaagaagagtgaggtgttggatgatccaagaacatttgtggcctcacagcggtagctgccagagtccccaaggcccagttctcggacctctaacttcagggagttggcctcagctttagcctggaaccgaccatgggatgggacctggggacccaggctggtggccaggaggtgctccccatggaacaaggccagcaaggccagggggcggctgtccacagtgcagatgaacagagccatgtggccctggcccatgtctaggagggctgacagctttggacggtccgggggatctgcaggaacagagggagctgaggccacccagcctagctcaccacattacaactgccacactatgtcccccacctcctgccacacacacagcctaagccatgctctttcctccccaaaccccagcccggcccctgcttctccccagaccacccctccaccctccaagtccccaggctgcccatgccagtcacccacagagtacactcaggagcacgggagtggagagctgggcaccagcctcagtcaggatgcggcaggcgtaaagggcagcatcagttctggccacgggcagcagtgtcacggtctccaggggaccctgggcccacagcaccccatttcggaaccaggagaagttagcagggctgccagcagcttcccggctcacgttgcaagtcaagttggcttctgtgccctcctgaagtgtgtgtgatggtgcaatggccaggacagtggctggagagcaggcggcacagcttactgaccacccccggcccccaggagccaggggtccagccgcccagcctggaaggagcaggaaggaggccccctggggtgcccacagggttggggagaaaagcaagctagctcacagggcagcctaggagaagtgggccctggggactgtgggggccctgggcagagagggttgcagtacagggaaggaggacaaggcagcccaactgtcccagctggggagtccttcctcagagaccagctgtgttgcctatccccggcctgaacagagatcatgggaaggagcagctccgctcttcctgaatgtggaggagggcagcgaagggcccccactgctgcacagagtggttttgcctgattagatcctcctcggagcagaacagtccagagctccagcccctgcccccaggccacccattccctgcctgactcaccctggccattgaaggtggctgaggtggaggcgttgcccagggcattgctggcctcacagaggtacaagccctcctcttccagcaaagggttgtgaatctccacacgcagcaagttgggggctttggtgaccttcatgcgtggggaacagcccccacaggtgctgcagccaccccctgatggcagggaagtggccacaacacggtccttgtggagcagctgcagcctggcgggggggtcgctgtccacacggcacaaaaggaggcctcgccgtccagccccggccccagcggcatcaaggtccagcctggtggtgaatgttggttgtcgaggggggtctgcagggaggaagaacatgggcactcatcccacggatgctccagggccccacaagcctggctaggctcccagaatacactggacaaaggcagatcccgaaggctgccccaagcagctgtgcagactgtgcactgcacaagggcagccagaccagggtgggtggaactcaagctaggctcatgctcctcaagctaagctgtgccctgatgcctactgagtcttcccagaagaaggagcaccattttctagctcagacaaaggtgctgtatgggctggctgccaccttgcataagtcccatctgctgctgagcagggtgcccacctagcaatccctgggggtcatgctgtctgctcccaccctgcacccaatgccttaccacggagcctcccctcaagatctgccctgcagcttatctgtgatctccaagccagctcctgtgatactagcgaatgcatagaatggcctcttcctgaaggcttctggagacagttggccaaaagagagcaatcagccaaggcccccatgtgatctcactcagacaccagaaaactttgcagaggcagctgccctctgacagttccgggacgtggctccggcacacatgtgtcaggggaagcctctggaatcaggcccttggtcttacacggagcctccccgcttggcggatgcagaggggctgtctgtccctgtgctgaggggctttgccttggtgtctatgggagcccagcacagcctgtggggcatgtgcacaaatagaggagtgtggtgtcccagggctcacccatgaggacaaagcatggatgtggtgcccatgctgagcttgaggctgggacagaggagcccacagggctggcattggagggtaaagacatggggaggtagagaaggccccagcctcatttcctaaacttcagccccacatggaaagacccactgtggccaggtctgtgacccagccctcccgatatagaccgtggggcagggcaggacagggctggggggcctagaggaggtggggtggctggtgggtcccggcaggaggctgcaacaggtggtggctgctcacagagcacagtgagaacagctggcgaagaggggccactggcactgtggccgtcccgggcccggcagtggtatgagccggcgtcagtgctggaggccgcggggagcaggaggctgctgccgggaccctcgtgaagcagggctccattcaggtaccaggagaagcgggcatcaggtgtggggcttaggccgcttctgcagctcagtgtcactgcctgtccttccaccacctcggctgccgggctgatgaggagacgggcggctgcggggagaggaagaggctgggaagggtccctcctctcaaccccacatgctgccctatatagaaagccttccagggttctcctttccccacactactgtaggtagctctgggctttgtggtgcatcaggagggtttgccctttaatgccaaatcagatctattggtagtagatggctgcagcatggttgaagattcagagccagagcccaggcttatgtccaacacctggcttggctgggcatggtagctcatgcctgtaatcttagcactttgggagactgaggcagaaggatcgtttgaggccaggagttccagaccagcctaggcaacatagtgagactccatctcaaacaattttttttttttgagactgagtctcactctgtctcccaggctggagtgcagtggtgtgatcctggctcactgcaacctctgcctcccaggttcaagcgattctcctgcctcagcctcccaagtagctgggattacaggtgtgccaccacacccagctaatgttatacatgtagtagagatagggtttcaccatgttagccaggcagatctcgaactcccgacctctggtgatccacccgcctcagcctcccaaagtgctgggattacaggtgtgagccactgtggccagctttttttttttttttttttttttttttttgagacggagtcttgctccgtcagccaggctggagtgcagtggcgcaatctcagctcgctacaacctctgcctcccaggttcaagcaattatcctgcctcagcctccctagtagctgggaccacaggtgtgcgccaccacacccggctaatttttgtatttttagtggagacggggtttcaccacgttggccaggctgatctcaagctcctgacctcaggtgatctgcctgcctcggcctcccaaagtgctggaattacaggcatgagccaccatgcctggccacaattttttttttttaattagctgggtgtggtgacatgggccgtagtctcagctatttgggaggctgagatgggaggatggcttgagcccaggagtttgaggctgcagtgagccatgaacataccattgcactccggcctgggcaacagagcaacaccctatctcaaaaaacaaaaagaaaaacctggcttgatcaattagctaccatgccctcaggaggagggaaggacagtgcacataccgaaagttggaagaccgtacttttcttttttctttttcttttttttttttttttttttgagacagagtctcactcttgtcacccaggctggagtgcagtggcgctatcttggcccactacaacttccacctcctgggttcaagcgattctcctgccttagcctcccaggtagctgggactacaggaactcaccaccatgcccagctaatttttgtatttttagtagagatgggatttcaccatgttggccaggatggtctcgatctcttgacctcgtgatccacccacctcggcctcccaaagtgctgggattacaggagtgagccaccacgcccagccagaagaccctacttttctatttggcttcccacatctgactgctagcatagagcctgctcccagagtttcataattaaaaaacaatgaatgcttctgagggactctccaagtttagggtcagggtaggtgcaaaaggaatgatgtgacctgttgtgtttccctttttcccttgacttccaggaagctctgccgttgggtcactgcacagcccctgtcttttatgtggcgtagccagttagctcagtcctgcggttgagtccactagacttctagaaggaacagactggagcaggctcctcctcaggctccctccactctccctggctgccagtgcccatcttaccattggcatggaagtccagggtggaggttgcatttccaagggagttggtggctgagcacttgtactccccactgtcagtttcctccaggtctcggatctccaggcgcagggagttgggaccagaggtaccactgaagcgtgggctgtgatcactgtccccggaggtggaggccaggatatgacccccatgtgacagcaccagtgtggccaggggctcactgaccacagagcagtgaaggatgcccacaagtcccgcctgggtctccaggaaggctgtcaggactggagtgagaggcgggtctgtgtggagacgagaggtgggcctgtcaccctcagacaagggcattccctggataccctgatacaacccgtgacctctgcaccgctttgtcccacactgccctgtgagaagggggtgatcccaaagtgcctgagtgcctgctgaatacacttttgtccttggctgggctgggtacgtcactctgttgtcccagtcagtgttcaaggccaccctgcaagtggggataaaagccccacttcaaagatgagaaaactaatagagagacctggtgagggacagcacctcagccaggtgaccaaagtgagcatcatcagcaatgggacaagctgacacagagtgcctcctgacagggcagagcagcatgtccgcggccttcccacccagagggcatggtctcaggccattcaagtcaggcaaatgtggagtgagggacctcctcagaacagcaggcctgcactctgcaagtttcaatgtcaagaatgacaaggaaagactgaggaacagtctcagactaacggagaatgaagagacgcaacgacccaatgcaatatgtgaactgtgattgtattctggaccagaaaaaaaatggctacaaaagacagtattaggtccactggtaaaatgtgaatatagattatagcttagataacagtcttctatcagccaggtgtagtggctcatacctgtaatcccagtactttgggaggccgaggtaggtggatcacgtgaggtcaggagttcaagaccatcctggccaacatggtgaaaccctgtctctacaaaaacacaaaaattagccaggcaggatggtgggtgcctgtaatcccagctactcaggaggctgaggcaggaggagaatcgcttgagccccagaggcggacattgcagtgagccaagatagcaccattgcactccagcctgggcaacacagtgagactccatctcaaaaaaaaaaaaaagtcttctatcaatgctaattttcctgatcatgatcattgcattgtggatatgtaagagaatgatcttaggaatttagcggtaaagaagcctcatgtctgcaacttcaggaatataaatatgtaggtagatacataaataacatatgcatatgtatatagagtgtccatatatgtataagtgcacatgtccacatagagtggatgtgcatacacacaagtgcacctgtatatatgcaagtctatatccatacatttatatgtatgtatgtgcgtgtgtgtgtctgtgtagacagcgagaaagattaagcaaatgtgccaaaatgttaataaatgggaaatctaggttaaaggtatataatcattatttgtctttctctgcaacttttcataagtttaaacttccaaatataaaataggagggaactagggaggtcaaagcattgcccaggtgtgcagagctgggacatgagctcaaggccacctccaggtaagtggccttgaagttcccatgcccaggaccccaacccttccttggggctccaccatctggtcctgctctgactgtgtccagtgccaccccaccctggcctcttacggttgactaccacgctgacagggcccgagcgctcgctgccatggacgttctgcacctcacagaagtagaagccagtatcagccctagtggccaagtgcagccggagggtatgggagtgggcatcctccagcaggacatggttcttgtaccagctgtagcggagatcactgggtgcctcattgggtgtgttgcagactagtgtcactgtctggttctccaggatgggacctgctgggctcacctggacctcagccactgcaagggcagcatagggagtgctggggggtcccagccaacttccagccccagccccatacagtccccgggtctcagccaatcagcctcaatctctgcacatcctacaccacccgcctgctgctacaggggagcctcctggagtgctctgcatctctttgtcctgctcaccaggatccccctgacaccccacccttcgtgggggtattgtcacctgtctcatggtaaggcagggctgggactccacacctgcatccaggaagcactgggttatgccagttgctggccctgccctgccctgtctcccctccgtccctgaggcctgagctcctccctattctctggccaatacgcaaccttcccaagaactcactgaagatgtggaggctgatggggggtgagaccaaagagcccacgccgttctcagcttggcaggtgtagacgccagcatcgctccaggctgcctggggcaggtgcagcacaccagtcttggtttggaggcgtaccccatccttgagccacttaatggaactgactgcagggtagctgctgttcacctggcaggtgagtgtgaccagctcacctggaaggatgttcctccccgaggggctgaggaggatcttcacacccttgggggcatctgcaagtcacagtagggggtattgggtaaggtgcttggggagggcagaggatggcacacttcttcttgcccccctttaaaagctcagtcctaaggaagtatgcccagataaaacagcagtccccttcaatcctcacccagggcatgctctgtctgcccatgtccgtccctttcccgccccctgcgcctgatgcattcctatgcccattgagagctgatcatgtgacgcttggccagcgtccagcctaccccaccagctgtagttttctgcttcccaatgctgtccattgctcctgctctatttgggatgagctccacacacagggtcatgggtaccccactgctagctttagtggcctgtggaagctattggtaagggaccaactacctagtgggagggggccaaaggcagcatcaaactagctctgaaaatagttacccagtttgtaagcaagaggccaacaacacaaagaactgcatttccttaaatcttgttccaaagcctctctctgtgtattcaagtgttttattcttatttttttagaaagaggatctggctcagtcagccaagctggagtgcagaggcacaatcatagctcactgcagcctgaaactcctgggctcaagtgatcctcctgcctcagcctcccgaggaactgggactacaggtgcaagccaccacatccagctaatttttgttttttaatttttttgtagagacagggtctcactatgttgcccaggctggtctcgaactccttgcctcaagcaattctcctgccttggcctcccaaagcactggggttacaggtgtgagccactgtatccggcctcaagtgtttaatatgtgccaggcactcttctaaatccttgacctgggtcatctcctttatttgtttttgttgttgttgttgttttttgtttgagacacagtctcactctgtcacccaggctggagtgcagtggcacaatcacaactcaatacaactccacccccggggttcaagcaatcctagtgcctcagcctccttagtaactgggattacaggcatatgccaccacacccggctaatttttgtatttttagtagagacgaggtttcaccatgttggccaagctggtcttgaatccctggcctcaagtgatccacccgcctcagcctcccaaagtgatgggattacaggcataagccaccgcgcccggcccatctcctttaatttttatcataaatctgtgagacaggaaccatctattgttatcttcgtcatagactgagaaaacagagccaggcaggaaagggataaatcccacctccccagcatcctccagcacggggtaaatcccggggcacttgctgccaaccctgaagctgcatgggagctcctgttccccaaccctttgtgtctccctttctctgcccagcctggcctcaaggacaagccccttcgaagcagtaggaggtggagggaaccatttaacgaagtccttggggctcagcagtgtctctccacttgccctaccctggaggcccaggagcagcctggttttgcatcaggagcaagggttccgtttctgtgggctggagaggggctggtttctgtcaggagcaacagatgcgctcagccacaagggtgtgtccccagacaactcacacttcacttggaggtgaatctcgctctgagccctgtgattggccacggagagctggcagcgcaggatccggccgtggtcctgccaggacatggccatgtggagggtctccaggtggccgacgccggtgggctcaaacttctggctgttgaaggtgacagagcgagcagggtcctggccttgccactgcagtctgacctgctcctgcaggcatacgtagggagtggagcagttgaagtccacctctgtgccctcgagaagctccaccggggaggcaatggtgggcaccctgggctcctctgaggacagagacagcagtgctcaggacccgcttttgccacccctgagatccctcgccctggaaaccccagctgaggagagagccctggggagggggcttttaggggaaggaaagacgctttctactccagccccacttgggtgaatacaagggagaaccaggcctgggcctacgccggggctggaacagaggctgagactggctggggttagattcaggacaagggctggggctgagagccaaggggtccagaagcagcttgggaatccctcccggggggcagccaggccaccccacttatcacctgttactgtgaccaaggtgcctttcacatctgaccagcggttgacctcactgatctcgaagcggaagttgtaggaaccagagtcctcgggctgcaggtccttcagcagcaggttgcacaccctgtgctcggggttccccatgaactcggtgcggccgcggaagcgggcctccaccagcttggggtccgccgagtggctcaccacctgccgctggcccgagtagtcgtagtaccagatggccgtgatgccgtcgggcacctccacgtcggcagggaagctgaagatgcaggggataagcaggcaagaccccttcacaccctgcacgtcctggggactggagacgccccatgaggcctggcctgggggaagaacggcagggggacagaggggagggtgatacaggcctcagggtgccacagagccctgcgacctgccccagagaaggtgccccagctgggctcccaaattctgccctgccccgagaaatgcacacttagagcagcccttctcagtgccccaggggtcagtccactgcccgaggctgctcagaggtttggtagggtggctcgaagacagatggcagcttcctgcccagctcctggccactgcccgattgggccctcccttgacctcagcaaccaaacatgtgacccaggcatagtctaatctgccaagggctggacttatgaaggctggaccctggaagacaggcactaggcccgcaaagcttacctgctgggaagaatgaggccaggaggagaagcttgggcaagaagcccatagcaggttcttgtgctgctcctgttgcctaagagggtggtgcgcactgcgctggctgggctcacaggggcctccagggacacctctgggcactttagccccagcacctgctagaagtccgagcctgtgtccccacctcctctgctggccaacccaataagagggcagggctcttaaagacctctgagtcagacaccagcagagagccaggaggccacgttcccagctcaggctgtgcccaggaatgccctcacttggtggcctgcctcagaaaagcctgtgtgtcccttggccctatcccaagttctgctttcccagcccctcaaggataccaccctaaggcagatgaacagctgtttctccctcttccccacttccctgccccctccccaccacccaaaccaacaggaactggagcccagagatgcccagttactcactccaagacacccagctagaatgatggtttcttcctgaggcttgtctcctaccacctgccttactaactatagaccataatggggctttactgaacttgccgaagtgctgcctttaacagtcactcccctgctcaaaaaccttctgtggctccccattgcccgtgagatgtgaaaagtcctcatttcctgcccccagctctgtccccattccctgctctccgcagacccactctgggggcagttctgtctgctcaagggctccctagctgcccagctctatctccaccacagataatctttgcctgctgaaaccttattcaaccttcaaggagcagcatgaatttggcttccagctggaacttctcctttgaggttcctgtagctaccccagagctatctctattttccttgccttgttttttacagcttgtgagagcccatttctcaggacctagaactgaagatatgtgccccatagcagtgcggagcctaccaggcattcagcaaaccccttagtgactaagagaggggtgaggtctttaggggttcagagctgaggttcagagttggagtggggaggtggcaaggcaagtctaggtttgaaaggtagcatgagagcgctgtggaacacataccccacaaatatgagctcaatgtgtgcggagtgtaccatatccaaaaaggcaggccctcaaccatggagtgcccctggtcagggagtgtctaaggggtaccatagacctgagcccaaaaggaagagatgccagaaacacatataagtgaaactataaaactcttagaagaaaacaggtgaaaatcttcatgaccttggattaggcaatgctttcttaagtatgaaattaaaagcacgaaaaaaaaaaataggtaagttggacttcatcaaaatttaaaacttggccagacacagtggctcatgcctgtgaacccaacactttgggaggctgaggcaggaggatcactttagcccaggagttcaagacgagcctgggcaatactgcaagactctgtctctacgaaaaattaaaaaacaggcctgtggtcccagctactctggaggctgaggtgggaagatcgcttgagcccaggggaggggtcgaggctgcagtgagccatgattgcaccactgcactccagcctgggtgacagagcaagaccctgtctgaaaagaacaaacaacagctgggtgcggtggctcacgcctgtaatcccagcactttgggaggctgaggcatgcagatcacaaggtcaagagattgagaccatcctggccaacatggtgaaaccccgtctctactaaaaatacaaaattagctgggtgtggtggtgtgcacctctagtcctagctactcgggaggctgaggcaggagaatcacctgaacccaggaggcggaggtcacggtgagccaggatcacgccactgtactccagcctggtgacagagtgagactcttctgtctcaaaaaaaaaaaaaaaaaaaaaggatatgaatcaaaggacactatccagagagtgaataaaaggaggacaacccacagaatgggagaaaatatttgtaaatcatttatctgataaaggactaatatccagaatatataaagaattcctacaatgaacaacaacaaccaccaaaaaaaccatgaaatccaactccaaaaatgggcaaaacacttgaataaacatttcttcaaagaagatatataactggctgataaggacatgaaaagatgctcaacatcactaggcattaggaaatgcaaatcaaaaccaaaccacagtgagataccacttcacatccgttagaatggctattcacaaacaaacaaagcaacacagaaaacaataaatattggtgaggatgcgaagttgaaattcttgtgtattgctggtgggaatataaaatggttccgtcactgtggaaaacaattgggtcattcctcaaaaagtcaacataggattaccatatgatccagcaattccactcctaggtatatacccaaaagtactgaaaacagggactctaacagagtacaccaatgttcacggcagcactattccactaaaaggtggaaacaggtcaagtgtccatcagtgaatggatgtggataaacaaactgtggtatgtacatacaatggaatatcaatcggccataaggaggaatgaattctaacatatgtgaaccttgaaaacattatgctcagtgaaaccagccagacacaaaagggcaaatattgtagggttccaattacatgaaatatctagactacgtatattcagagactgaaagtagaataggatagaggtaaccaggggctgcagggagggggagctaatgtttaatgattgctgagtctctcagataatgaaaaagttctggaaatagtggtgatggttacacaatattgcaaatgtacctaatgtcatggggtgtacacttaaagacagttaaaacagtaaattttacattatgtatatttcaccacatacacacccatgttgccaactttgcaatcctccctggtcctaaatgctgacttggccaagtgaacgaggaggctggaagtggggacaggaaactcatgacctcccagctcccagcccatccgcctcaggggctgggctcagcagattccaatgactaccaggggtcacacctgggaagggggtgagccgaggcccagggccagtcaggctgaccaggtgggacttagcctgctgcagaaggcagaaggtgccccagcagggggcacagtacagggcgggattgggacaggaaggacaccgctccccaggggacccagccctctcgcaggctgctggagtggactgatctggccatttatggaggcccaagggctcatctccagttctctaggaagccctaggcctcctcctcttctgggaagatgcacccccagcctccacaccaggttcttggccactggagaatgatatagctggggccctgggacctggacacctcaccgtgaagaaaagcagcctgctgggcacactgggggtcagatgtgtccctggccacaggggatgtcagggtcagctctgctatggccagggcagctatcttgtcccagctcccctgttcctcccatttggggtcctgaaaagggcaatcgtgaacctgatggaagaatggtggggttctggacacagcgaccctggaacagggcgcgggggaggaccctttccaggaccactcccatcacataatgtagaggccacctatgcttagcccggccctaaccccaaaggggtcagccccaccggaatccagcctattggctcagcctgtcaccacaaaggccagcttcagcccagataactgttctggaaacagaaagagcagggaccgctcagaaaggagatctctgtccctgtttgaaagcctggagttgaggggacagtgccccgccccccgccccccgcaacttgggttgcagctgtggcctagtgagcacgcagcgccccctggtggtcgagggggaattgcgggtcccgggaaagggggcggtgtgccagcaacagggagcaggcagctctgcagccctgaaccatccctcccttgggtgactcttttggaaatcattgttccccagacaggaggttcctgaggttcatacttgggtctccaagtcttgggtgctctgaagacaggattttaaatccccactcctactattggtatgtgttgcatcagggtggcttgagctggcctggtacacagtgggcactcacgtttgctgcctgtttgagaccaagtgcctcaggaggtcttggagggttggctggggccccaagtccctgacctctgattccagaggccaagtttagctggggaagaaagggcagaggcagtttccctatggacagctaggcccgggtgtaggattcagtttctgtttcctgacaccaaggcttctccccaacttccccattgggctagagaaggaagaacacagggtgacatggccagctggaggttactggcccacagatagggagtcagggtacggatgggcaattcctggagcagattatggtcaaaatagtggaaatccccaatcacaggccaaatgtttaattctcagagccatagaatccataactaatgcttattggctttgacatgggcagtagaaatttcacacttcattccttaatctggctctaaatgcttctggctggagtgctcactctccaaactgtgctggacagcaccagaagccctcctgtggacggacgaagtggtgatggatgaagtggaattgtgctggggttagagtaaggagagattatcgttgggctgggctggggctgaggtcagggtgatgatcaggttggaattctggaagcaaattaaggctgggattggggtggacattgaggttgagtgatgggtgggggtaagggtgaaggttggagttgggtgcaggtgatggttaagatacggtggaggctgggttgagatgaggatgatagagtcggagttgtggttagggttgggatgatggatggttgggattagatgagatgagtaaatggttagggttggggtgcaagtgaggtgagggtgagataaggttggaataggggctggggctggggctgaggtagggtcagagcagggtgatggtcgggactgggattgggatgcaggttggaaggatttgggggtggtggaagggtttcagttgagtccatctttgattagtgtcttggacttgggttggtttggggtccaccactcgcacccagatggagcccccccccgacccctgcccctatcccgctcagccagtttcagcccagccccgctcctaatgctccactcaccctctgggcccagggaccagggacaggggtacctgctccacagaaggaagtggctgcggcggtgctggacctgcggagaggagaacaggaaggacggccaagagctcctggtgcagctggctccccagggctctgccggctcaagagagaaggatcccgtatcaggggctgcttcctctttcccaaagcctcagctctactgtccaacccagaggctggtcagggaggcagctgcaggccttgcgcaatgccaaaacgggaaagacctccataggggaaggccctcggcaaggccagggacttagggactccagcaagcagaagtgggaccgctgcaacgctggagcctccccaggcaaagtgagaaatggagtgggggactcccattcaccagccaaatccacaccccactctctctgagccccttagggaggctgggggaggtggaagggggcttcctgcacacagctctcctccctgacacctgagagggaggcgcgcccagcctggggtggggatgcactacacgatgcccagaccaaggcagttattctccaagccattcaggagcctccctgtaccactgagtactcttaagaacccccaagaggcagtcccgtgttgtgggggacataaggccccaatgtccaggacactcctcaggttttctctttcccctctcactgtcctgtacgttttttggtttttggcttcttgttgttggtttttttctttttgttttgtttttgcttttgagatggagtctcactctgtcgtccaggctggagtgcggtggcacaatctcagctcacggcaacctccacctcccgagttcaagtgatcatcttgcctcagcctctcgagtagctgggattacaggcatgcaccaccacatccggctaatttttgtatttttggtagagacggggtttcaccatgttgtccaggttggtcttgaactcctgaccccaagtaatctgcctgcctcggcctcccaaagttctgggattacagaggtgagccgctgcacccggccactatcctataccttcacccccaccttgggacaggaaaggaaagcccccaccacagctagttactgttacattactgcagcccatcttattgagggcctagtttgtgcaggcacttgacatgtgaagcagatgttaattgctccaagcaatcccagatacaagcaacaagactttttttggtttttgtttgtttgtttgtttttgttttttgagacagtgtcttgctctgtcgcccaggctggggtgtcctggtgcaatcttggctcactttggctcactgcagcttcgaaattctaggcttaagcaatcctcctgcttcagcctcctaagaagccgggattacaggcgcttgccactatgcacggctaattttttaagttattttgtagagacggagtctccctatgttcccaggctggtctcaaacacctgggctcaagtgactctcccacctcgacctcccaaagtgctggaactacaggcgtaagccaccactcctggccatttttttttttaatttcacaactcaaacttaattcaactcagtccctgcctacctgtactggtggggagctggccacagcaaattaggcccctgtaccctgagggcaaggccacgtgtgcaggtgtaaaaggatgtgaaaccctaaatcagggtggatccagaatcgcaggccatggtgccccaaagcagatgtctggtgacattccaccctgaaatgctcaggctacagagatattaggtctctatcactctgttcctctttatagctcctgtgtccactcctatgcttgggccatttcctctttcggccaaaacacaaagggttcatcccattacttcctccctcaacagctggtccggagacacccagctctaggcctgtggggttgtgacacatgggtaccaatccttcagtccactgggactctatacatccaccccttggcttcatggtgggaaagcatcccttgactttgaccttagtcatatgacttgctctggccaatggatgtgcacggacatgacacaaactaagtcttgaaacgtacttaagcagtttgcctttccccctgaatttctgtcattgccatgcaaggggcaggctccaactaacctgctggtccaaagaggatgacgaacacatgcagatgacctgaatcagacccatggattgaaacaaaactcagctgagcccagcctacgtccaccagaccagtcaacctgtggatgcgtgaatttattgctggatgctgctgagaattttgtggctacattagcaagatgatacaaggcctaagtcccagaacaacacacccagaacttgcttacctttccttagcatgaggagagcaaagacttgtctaccttgattagtcagggagcactgcttcctgtcatttccttgagtatacagcaaactaggtaaataaataaaaataactaggtaggctgggcacggtggctcacgcctgtaatctcagcactttaggaggccgaggtgggcagatcgcttgaggccaggagttcaagaccagcctggtcaacgtggcgaaaccctgtctctacgaaaaatacaaaaattagctgggcctggtggcaggcgcctgtagtctcagctactcaggaggctgaggcacgagaatcgattgaacccgggaggtggagattgcagtgagccgagatcacactactgcactccagcctggatgacagagcgagactctgcctcaaaatattttaaaaaatgtaatttctcagtaggtcacactgttacacattcatctaataacaattattctttttcttttttttttttttttttggagatagggtctcactgtcacccaggctggacaggctggagtgcaatggcacaatctcggctcactgcaactttgacctcctaggctcaagtgatcctcctgcctcagcctcccaagttgctgggactacaggtgagtaccaccagacgcagccaatttttgtatttttttgtagagatggggcttcaccatgttgcccaggctggtctcacactcctgagagttcccagtcaagtgatccacccaccttggcctcccaaagtgctgggattacaggtatgagccaccatacccagtgaattattctcgttccagataggaaaaccaagtcatagggaggttagagaatttgccaaagacaaaactttttggttgaaaaaaaataagttttgctacaagtatagaaaacaccaaataacggtgttttaaataaaatagaagtgtttcaccctctccctcaagtaagtgttggcatccaagatgatatgacaactccacaatcatgaaactagatccctttttattttttggctcagtcattgtcaatgggctgcttccagtcattgtccaaagtggctgcttgcgctccagccactgtatctgcattcgggaaagcaggatggaggaaaggacaaagtaggccatgccctctactttaagataactccttaaattgctgatgtggtgggtcactcctgcaataccagccactcaggaggctgaagcaggaggttcacttgaacccaggagcttgaggctgcagtgaactataattgtgtcactgcattccagcctgagtgacagagtgagatcttgtctcttaacaacaacaaaaaaggtaattctttaaattgtacactttattgctgcttatattccactagaagctagaagttagtcacatggtcttaagtctttattctaacaggtgatgtgcccgagtgaatcctgggggcccagtgctaagaagtagagggagatgaagccctgccctcctgtggagcaaccaggaccttaattcagtcattcattccttggacctacccagattccagcctcaggcccctgcccacctccttgccagtatctctgcagagcctcctgcctcccccagagggtgccagagccctctgcttcctcagccttcagacccacttgctgtgtctcaggtggggacaactcagtctatagaggcccaagggagatctttgagacccatactgtagtcagcttggggcagatgggagtcatgtagctcactggctaaaagcctaggtcctgcatagagctgggttcaaatccaggcatatccatcacctgctctacgatcccaggagtcactcaatgactcagaagctagagtcctctggaaagcttgtatgaagagttcccagggcctggaacatcaaaagagctctgagaatgttggctctgctgttgcttctcttattgggtatctgaaggccgtactctcctctctcctccacccgaggtgacctctactctcatagccacaccctggaccctcactcattcagtcacctcacccagtctgtcatctgtccctctggctctcctctcctgttcatgcatcttgtactcacccacttctgtccctgagtgtttcaaggctctggggttttcagagacactgaagggacctccctcctcaacacaaccacaaggtctaggtggaatgacccactaagggaccggctctgaagccagagacttccagggaaagtcaacaagcccaaggatgcccgttacaagaaagttaaaagacccatgtacatgtcctcccgttttattccctgctcagggtctgggcatacagtggaacacatgcagtccccaaaggacaccgtctgtacagagtcagatggagttaagaacatttagccggctgggcgcggtggctcacgcctgtagtcccagctactcgggaggctgaggcaggagaatggcgtgaacccgggaggcggagcttgcagtgagccgagatcgcgccgctgcactccagcctgggccacagagacagactctgtctcaaaaaaaaaaaaaaagaatatttagtctgggcacggaagcttatgcctgtaatcccagcactttgggaggctgaggtgggcggataacctgaggtcagaagtttgagaccagcctggccaacatggtgaaaccccatctctactaaaaatacaaaaattagccaggcatctgtaatcccagctactcaggaggctgaggcaggaaaatcacttgaacccaggaggtggcggtcacagtgagccaagattgtgccagtgcactccagcctgggtgacagagcaagactccatctaaacacacacacgcacacgcacacatatttaaaccaccacaccaacatctagttcaagatggtggactgagaacttgtctctgccattcctggcccatccaataccactgagagcacagtaagcaaagggaaaaggagacagaagggctgggaacaggatggctgggggatgggaagtatccactgcacaggattttgatttaattctagaagatagaaagagggaggatcacgttcaggaacagatgcgggtaaaggaaaccagagccaaagcacgctgagagaaagctgccccagaggccggagcagaagtggactctctacagggactcaatacaccccaaagggttggtagctggcacacgtacctctccacccccacatgtaacactgcagggcagaggaaataccctaggtgagttccagtatcaatcaacctgccctttgttcataaagatgaattggttaccaggtattaccagacaggtgaggaagaccaacacaaagagaaagatccagaaacaaacaggccaggcgcattggctcacgcctgtaatcccagcactctgggaggccaagatgggtggatcacctgaggtcaggagttcaagaccagccttgccaacatggtgaaaccctgtctctactaaaaatacaaaaattagctgggtgtggtggggttctcctgcctcagcctcccgagtagctgggaggctgaagtaggaggttcacttgaacccaggagctcgaggctgcattgaactatgattatgtcactacattccagcctgagtgacagagtgagatcttgtctcttaacaacaacaaaaaaggtaattctttaaattgcacactacattgctgcttatattccactggctagaggttagtcacatggtctcatgtctttattctaacaggtgatgtgcccgagtaaatcctggggccccagtgctaagaagtagggggagatgaagccctgccctcctgcttgaaccctagaggtagaggttgcagagagcggagatcatgccactgcactccagcctgggtgacagagtgagactccatctcaaaaaataaaaaataaataaataaataaataaataaataaataaaaacctacagcaaagaacaaagagctattgcaccgttactgtgggcctggcagtattatgacaacttttttttttttttttttttttggagatggagtatttttctgtcacccaggctggagtgcagtggctcaatctcagctcactgcaacctctgcctcctgggttcaagcgattctcctgcttcagactcccgagtacctggtattataggcacatcccaccacacccggctaatttttgtatttttagtagagaccgggttacaacatggtttcaccatgttggccagtctagtatcaaactcctgacctcaggtgatccacccgcctcagcctcccaaagtgccaggattacaggcatgagccaccacacccatccagtgttctgacaattttatacttattaactcatttagcaaccctctgagctagatgctattgttatctccacttacaggaaactgagtcacagaatggtacagtaaaataaccttgaccgaggtttacatggctggtaagtggcagagaaatgaaacttgaacccaggcaacctgtttcctgagttggactctgaactactcagccatactgcctatttatttatttatttatttacttacttacttatttattgagatggggtcagccgggcatggtggcttacgcctgtaatcccaccactttgggaggctgaggggaacagatcacttgaggccagcagttcgagaccagcctggacaacaaggagacagggtctcgctctgtcacccaggctggagtgcaatggtgcaatcatggttcactgcagcttcgacctcccaggctcaagcgatcctcccacctcagcctcccaagtagctgggaccataggcacccactatcatgtccagctaatcgaaaaaaaaaaattatatagagatgggggtctcactatattgcctagactggtctctaactcctgggcttaagcaatccacccaccttgccctcccaaagtactagaattacaggtgtgagccaccgtgcctgaccaatacttcctctttaataaactaaacaaaaagtgaacaaaccaatcccggagggaacagataattcaaggaatacaagaaaacttatgaaaagaaagattctagtgccaatatgttcataaaacaaaaaaaaagcagctatgaaaagaaagcaaaaaataattcttggaaatttaaaatagaattgctgaaataaaaagaaattcaatagaaaagggtgtgaacatctgtggttttggtttccaaaattagttcactcttctttgggtaaaaataccctgattttcctgctgtattctcaagccctgtgggttggtggaattgacacctcttccatttactgcacgagagaagcatgttgctgctcacagttcattatgaggagccagcaggtaaagacaacactgagggcagatgaaagatatatactgaccctgggtccttgtggacatcattgagtccctggatcaagccttacctgaagctaaagggatgagtgcttctcactgttaatagccactgatcaaattccatagaaggactccaattatccttgcctcagttgtgtgtccagccctcggatgagctaccatcaagggaaactgccagaccttggtgacaagcccacccactgaaaatggggaaaaaacccaagtcacatcattgaactgaaagagctgcagttccccgaaagacaggagagaaggaatgctggataaacacaacaactacttcatctcactgcacctgcaaagaatccaggcacaggaaggtgggcacagcaagtagtctttctggttgacataacaaagacaacatctgtttcttctctcagaaagaagtaagaaaggcaattggagaaccagaaacgacaaaatctattccaggaccaaatagaaagaaaacacatctgaagcatgattttgaacaattagtggggtgtaagaaaagagaatccatttgaccttgacatctgaaacagcaaatattctccatcaaggcactttagggtagaggaaatgatactatgtttccttctcaaaggagctatctggttacgtggttctgcagtaaatgacgtttatacaatcataacatccgttggttttcaattttcagaatcaacctgaagataaagcatggaagatttcattataattaccgaacagcatgcaaatgttacaaactttgaccatgaaaatgtaaaaaagagcccaggcgcagtggctcacgcctgtaatcctagcactttcggaggccgaggcgggtggatcacaaggtcaggagtttgagaccagcttggccaacatagtgaaaccccatctctactaaaaatacaaacattagctaggcatggtggcacgcacctgtagtcccagctacatgggaggctgaggcaggagaatcacttgaacccaggaggcggagtttgtggtgagccaagatcacgccgcggcactacagcctggtcaacagagcaagactccatctcaaaaaaaagaaaagaaaagaaaagaaaagtagacagcagaaattagagggagatggcaggtgacctggggctgggggaggcacaatttttcttacatagtgatagggctcaagaaattctttctaaaattgatgtatgaggaacgaaattttaaatatagattgtttagaactataagtagcaccaacacaggactccagtaatcacacagcaaacaaaactgagaaaacagacatgggcggggagatgggaatgggtgatttccattccctgctttaatgatgaggtgtcagtagatgctctcttgagttactaaattgagaaacaaagataaagtatattgtttagaggagtgatgttcaaactccagaaaaggctgggcgcggtggctcatacctgtaatcctggcactttgggaggccgaggtgggcagatcacttaagcccaggagtttgagaccagcctaggcaacatgatgaagccctatctctactaaaaaaaaaaaaaatacaaaaaattagcaaagcatggtggtgcacacctgtagtcccagttattcaggatctcactactgtactccagcctgggtaatgagagtgagaccctctctcaaaaaaaaaaaaaaaaaaagaagaagaagaagaaaactccagaatatataaaaatgaaaagagggcggaagagtggaactgcggggtagaaaattttgcattttgtttcatctctctgtatatgttgaactttttttttaacctacatgtactacgtcatatccacagcccccaaccatccaccaggcatcaactgctgtgtttatatggagggttgagcaatcattcctgcctccttccagttcgtcttcctgtactgcagaggctagaaaactaaatttatatcacccagattcccttccagctaccttaatgctaccacctcattcagccatcattgattctccacttcaccaaactggtcaataattgtctcttctaaaaatattagaattgggactaagagacactacagctgacccttaaacaacatgggtttgaactgtgctagtctgcttatacacagatttttaaaaaaataaacatattgaaaaaaattttggagagatgtgacaatttgaaaaaactcacaaaccacatagctagaaatatcaaaaaaaaaaaaactgaaacagagttaggtaggtcaggaatgcataaatatatatgttaattggctgtttatattattagtagggcttccagtcaacagaaggctattagtaattaagtatttgagtcaaaagttatacacagatttttgatgatgaggaggattagtgcccccaacccccatgttgttcaagggttagctatatttgaaatctgctggtagctggaattgggcaactaaattcacgagatgtggaacggtcgtatacatggagaataaataaataaataaataaataaataagtatttgttggcctggtgcagtggctcatacctgtaatcccaacactttgggaggccaaggcaggcagatgacttgaggtcaggagttcgagaccagcctggccaacatggtgaaataccgtctctactaaaaatacaaaaatcagctgggcgtggtggtgtgcacctgtaatcccagctgcttgggaggctgagggatgagaattgcttgaacctgggagtcagaggttgcagtgagccgagattgcaccactgcactccagcctgggcgaaagagtgggactctgtctcaacaacaacaacaaaaaagcaattgttaaaagaataagaaaacaagccacagattgggagaatatatttgcaaaacaaatatctgatgacccaaaatacacaaagaactcttaaaacccaacactaagaaatcaaacaaccccattaaaaaatggacaaacgggccaggcatggtggcggtggctcacatctgtaatgccagcactttgggaggccgagcagggcagatcaccttaggtcaggagttctcaactagcctggccaacatagtgaaaccgtctctactgaaaatacaaaaattagccgaccgtggtgacgtgcatctgtggtcccagctacttgggtgtctgcggcaggaaaatagcttgaaccagggaggttgcaatgagctaagatcgcgccactgcactccagcctgggcaacacagtgagactccgtctcaaaaaaaaaaaatgggcaaaagatgtgaacagacacctcatcaaagaagatatacagatggaagataagcatatgaaaatatgcttaacctgatgtcattaaggaattacaaattgaagcaacaaggtaccactaaacccctattaaaatggtcaaaatccagaatgctaaaaacaccaaatgctggtgaggatgtggagtgacaggactctcattcgttgctggtggaaatgtaaaatggtatggccatttttaagacagtttggcagtttcttacaaaactaaacatagtcttaccatacaatctaacaattacactcctagatagttacccaattgaggtgaaaacttatatccagggccgagcacagtggctcacacctgtaatcccatcactttgggaggccaaagaggaaggattgcttgaggccaggagttctttctttttatttatttatttatttattttcttttgagacagagtttcgctctgtcacccaggctggagtgcagtggagtgatctcatctcactgcaatctctgcctcccggcttcaagcgattctcctgtctcggcctctgagtagctgctgggattacaggtgcacgccaccatgcccagctaatttttatatttttagtagagacagggtttcaccatgtcagctagactggtcttgaactcctgacctcaagtgacctgcctgcctcggtctcccaaagtgctgggattacaggtgtgagctactgtgctcagccaaggccaggagttccagaccagtcctggcaacacagtgatactctgtctctacaaaaaaaaatttttttaattagtcacatgtggtggcacacacttgtagtgtcagctactggggaggctgaggctgaggatcacttgagccccaggagtttgaggttgcagtgagccacgattatgcctctgcactccagcgtgggcaacagagtaagagaaagaaagagagagagagagagagagagaggaaggaaggaaggaaggagaaaagaaacgaaaagaaaagaaggaaggaagggaaggaagggagggaaggaagggaggaaggaaggaagaaagaaagaaaggaaagaaataaaaaaggaaaagaaaagagagagagaaaccttatatccatacaaaaccctgcgcaagaatgtttatagctgctttattcataattgccaaaaactggaagcaactaagaagctctccaatgggtgaaaggataaacaaactgtggtatatctgtgcaatggagtatcattaagtaataaaaagaagacttagcaaaccacaaaaagtaatatgcatactaaatatgcatttagtaatattaatatgcattaagcaataaaaaaagacgtgtcaagccacaaaaagtaatatccatattactaaatgaaagaagccagtctgaaaaggctacgtgctgtgtgatttcaactatttgactttctggaaaaggcaaaactacagacagtaaaaagatcaagggttgccgggggttctggggacaggaaaggatgaataggtggagcacgggaattttaggtcagtgatattattctatatgatactataatggtggatccatgatatgcttttgtcaaaacccatagaaagtacaacacaaagagtgattcttaatgtaaactatgtgctttagtcaacaatgtattgatattagttcattaattttaacaatgtaccacactaatccaagatgttaataatggggaaactgcgtgtgagggaggggatacatgggaactctgtactacagctcaataattttataaatctaaaactttttttttaaataaagtctcttagaaaacaataaaaataaaataaaaagtcaattttttttttttttttgagagggaatcttgctctgtcacccaggctggagtgcagtggcacaatctctgctcactgcaacctctgcctccttagttcaagcgattctcctgcctctacctcccaggttcaatcaattctcccacctcagcctcccaagtagctgggactacaggcatgcgccaccacgcctggctaatgtttgtatttttagtagagatggggtttcgccatgttggccaggctggtcaagaactcctgacctcaggtgatccgcccgcctcagcctttcaaagtgctgggattacagggttgaaccacatgcctggtctaaaatgtccatttttaaaaggcagtctggctggggcagtggctcacgcctgtaatcccagcaccatgggagaaggctgagcagggtgtatctcttgagcccaggagttcgaggctgtagtgtgctatgatggtgccactgcactccagcctgggtgacagagtgagactctgtctctaaaataaataaataaaaatacaataaaattttaaaaggcaatctgcagcaagagaagatgaagttagcaggagagcaggacagaggagagtccatgaacaacagggagaggaaagtggtcatggtggcagctcccaggctcctggcatatgttcaattccctgttcccagccctcaggaagcccagatgtccccacctgcccctacatacaaaccctggatccttgacatcaacttctcctttccttcatgtgctctaatgagtttttgttacttgtggaacatttaactaacatcattaaccaagtggacctgtctcagagtggtgttatgagaagacagcagccaaaagacagctgcagccaagcacagtggctcatgcctgtaatcctagcattttgggaggccgaggtgggtggatcacctgaggtcaggagttcgagaccagcatggccaacatggcgaaaccccctctccactaaaaatataaaaattagccgggtgtggtggcgagcgcctataatcccagctacttgggaggttgaggcaggagaattgcttgaacccagggggcagaggtggcagtgagccgggatcatgccacttcactccagcctgggtgaaagagcaaaactctgtctcaaaaaaaaaaaaaaaaaaagacagctgcaacaaatgtcaagttctgtgtgttttcttttcttttcttttttttctatttaattaatttattttagagtcagagcctccctatgtcacccaggctggagtgcagtggcacagtcacagctcactgtagcctcaacctcctgggctcaggcgatccttccacctcagcctccttcctagctgggactacaggtgtgtgccacgacatctggcttgtgtgttttcttttctttttttttgagacggagtcttgctctgccacccaggctggagtgcagtggcgcgatcttggctcactgcaacctctgcctcctgggctcaagcaattctcctgcctccgcctcctgagtagctgggaatacaggcgcacaccaccatgcccagctaatttttgtatttttagtagagacggggtttcaccatgttggccaggatggtctcgatctcctgaccttgtgatccacctgactcggcatcccaaagtgctgggattacaggcgtgagccactgcaccctgcctggcttgcatgttttctgacatactgtcaaaaggatactcatactaaatggcaacacattctcaagccccttccttttcttctcctatctgctttaccacacaccatagctgcttttaccgttttctccttaaaaactcaaaaaaaccttcccccaacctatctatccacttcttgtcctcccctcaaacccactccattttgattctgcatcataaaaaccaagcagagttctggggaggcagaagcctcctcttatgatattggaagggggtggatgaaattgagcacacaaagccagaatcctcttttgtggaaagatgggggcagtgggcagagggaagcaggctcatctctttccctctcttcccttcccttctctttcacaccacacgctccgcctgggtgagctcatcgtcctcgtgtcttcaatttccacctccaggagatcgactgccaaatttctacccgcaatcccaaactccactctgagctccagacccatctactaattgcctagtcaacattttctctgtgggatcgaatcagataggattatattctgctgtgactaacagagactgaaaattcagagtcctaaacaaaagactttctttttcttgtgctgaaaagtctggaagtacacagccctaggctggaatagggatactgctggggggctccgcctccttgcaggctgcccctctgctatctccagggtgtgtccctcaaccacactgtccaaagtggtgactgaaggaccagtcctcccactgacattccaggcaacagaatggagaagaacaggctgaggaaggaggaaccacaggcgccctccagctgtttcaaggaaggttcctggaagatgctaaataacaattccgtttatatctcattagccaggcttagtcacgtggcaacacctagaagcaagaaaggctgggaaatatactgtttctgctgggttaccgtatgcatgactaaaaagagagcgctctgttcttaggaaaatgagaatagactgggttgggggaggataaccagcattggctacactgcagccccacaacctcctcatgcttgatgtggctgaaataaaaagagcatctccccctaacatttcctttcccttagtcttgttccttttctgtaccccataccctagcagaggggcaattctgtggggtgggctcactggcaaggggaggtctcacccaagctcagtcaagggtgagcagagagaattgtacaaggaagctgaatttccagctggtctggaggaaacactgaaaaccccaaacagaagatgtccaggtggagcaaatgcagctgagagttcttgtccaaggggacagaatgtcagcagagtaggacacaagggcaggtctctactgaaagcaccaggggcaaagtcacccagcccttcaaccggctggccaccaagcacatcggctccactctgcctcctgcccgtgccaccctttgcacttttgtctgtaccatctcctccaccaggagtgcccttcccgctcctccatgtggtatactctcagccacccctcaggctcagatccagagccacctcctccaagaagtctccacctgtctgctgggaaccctcacatcacactgggagacgaagccaaaagtgggggggtcagtacagaggtgtgggaggtaggtccaatcctggctggacctggctttgggtgccatttgggacagggtattggggaggttcagcaggaaggtgggacctcaaggctttctttttatgaaggaggaggaaccagctgttgacagagcagcaacagcagggagccaccaaggctgagccttgaaccctgggccaccaggctcctgcaggcaactgggagcagctcagcctctcacagtcccatttccagggaggaagatgatgcagcctgaggcaattggccacctggaggaagttcagctgggtggggcaggcagaggaattcctggaaggaagctcacccctcagcactggggtagagggacactagagacaggggtggcccaggagctgcccacctcctatccccatgaataagcaggtgggcccgggtgaccagctgggagccacccctgggtgctcaggtaccatgcttctggcccagcctcctgagctgtggcacaggcaagagcaccggcccacggggtctgcatggggcagtgacctgttctctctaagcttcagctttctcatctgtagaaagagggtgaagagtccttccccaccatggttgtggtgagggtaactgaagtgtcagggtaggggacccagtggggcaccagcacacctgaggttcagtcaacaaggcccactggtgaagaaaacctcgcccaccctcccgtccctcctgaggcaggtggtggaggcacatgccctctccattgtgtgtgcatgagtgtgtgggtgcatgcatgtgtgtgcatgcaagtgtgtgtgcatgtgtgtgcatgcatgtgtgtgcgaatgtgtgtgtgtgcgcacatgcatgtgtgctaagctctggagaacaagcagccaggcttgggcaggagtccgggggcaagggggggacatgcaaagttctctccacagcccctcagtgctaacaggctgaggtgggggatgacatgtcttagaaacaaacttcaccctctgccctaaaactgcctgctggtctgccacatcgggccaagctgtgggtacttggaaagagggccctgctcctgccttccaaacccaggaagtcttgaaatccccatggaggggacctggggccaggggactccccaagcagacacagcacccacacaagggtctaagggacccctttctccccaaccgcctgaggtagggatggatgtggacaagcagctcagggctggggctggcctaggtggaaggttcagaagcacagaaggcaggacgtgcccaaggggctggacatggggttggaggctaggggctggaaaaagagtttgggaggtcagccaagggcagtccacgccttggctcttctctgggtcatggggagccacggagagtataggagtggtgatgggatggccccagagttgtgcctttgaaagtcacctctggttgcagatagagatggactgggggcagggctgagaggaagggcatctcatgagaggggaaatccctgaccacagtccagaggaaaacagcgggcctggggagaggctgctcctggggaggacctactcagaggctgattcttcctcgtgctaccccacccagggagatgcaggaagctggtgaggtcagtgggtgggcccacaaccatgctggagaggagcaggagggagacgggagggcacagagaggtagagggcagggactctgaggaccctcatccatgcccacctggacaattgaatcgagcttcctctagtgtggaatgtgggctcactggggctatttgctatccttctctcatgtcagactggatgcggcccaagggtggggtctgtgactccctcatcagactgaggggggccgaaatgtgggggtgggggaaggagggagcttccaaacaggaaggtttggagggcgctggcactgaggacaggggatacgccccccatgagtcttcacccctgctcagagcctgctgccgtggccctcagagacgagcccatctttggagctggagttggggacagggaaaccaggtggaagggaaaaagaaaaaaggggcaggcatgagtgtgaggggccagaccctgcagaccccaggacatgcacagcagacacacactccaatccctcctggctctgctcagcctcaaacgaggtgcaggcctgcaggccccaaccaaggacccctgttacacacagacacaaagacacaagatgcagcaacacacacacgtaatacagaaacacagtcacacactagcgcacacacagacacagtcagacaatccaagaaacacactcacacatgaacagacatataagcaaagtcttacacatacaaagacacacttaagcacagacacaaacacaccaacagatgcacagacggacacacatagacgcacactgggaggcggcctgtggagactgctgattggataccatgttggcttggtatccagaattgttggtgcagcgcactcaccatgcctgacctcattaaggaggccctctggggcagtggctctgagaagaaaggcagcaagcctagggaggtgacactgtagctggggagcattttggctgggcagagaggaggaaggagagcatttcagggagggaaaatagcccttgcaaaggtttggagtggaagagcaaaagggatgtcccaagaactgtgcctcatttgatggggctgtggggcccttctctgacgggcagccttcccaggcacaaagggaggtggactgagaagcatctggaacttctgtgggggcacatggggcagaggggaaggggaacaggcagaacgagtcagctgcctttgaaagctccacgagggacctagcagaaattcattcattcatccgttcattcatttatttatgacaggttctctctctgtcacccaagctggagtgcggtggtgtgatcacacttactgcagcctcaaactcttgggctcaagcaatcctccaccccagcctcctgagtacctaggactacagacgtgagctactacacctggctaatttttaaaactttttagagacagggtctccctttgttgcccaggctggtctttgttgcccagccagcttcaagccatcctcccacctcagactcccaaagcgctggattacaggcatgagccacgggttcccagcccagaaagagaccttcaccccacaaaccccctgtctggaggccaagtcccagcatccccagaagggccccggttaggacaagaaaaaggctgtgtgcctcggaggagaggctgggtgccccctggtgcggagtggtccccttgccgggcatggggcctcagtctgtgagactccgcgcctccgtcgtctgaacttgagcaaagacagagctaggcctagcctggggacccgagggcctgccctcatccgcaattctgcctcttttctggccactgaggaccgggctagggaagctgtaggggcagtaggggtgggaggagagagggttccgggtcaagggactggaggggtctggggcagggaagtggaggggtctagggcgggcccttccccctccgctgttgggccctcgctgaaggggccgaggctgagccccaaggtgggcctgtgggggcggggcgggggagcccctcagcagctggaccgcaggaggccgaccagggtctggaactcctcttcccctccctccgccgccccctctcccttctcccaccccctgggctgctaggggagcgggggaggcgcaggaggggctcagggaggggccctggacgcgggaccaggctgggcccctcggcggaggcccgcgcaggcaggccccgccccggcctcgcacatctgggccgggagcgcgggccgacccggcggcgcaggcggcgcggccatccggcctgggggagggggcggcgggcggggtgggcggcgcgaggaggcgggaggcctcagggccgggcgcacgtcgagggctgcggccgccgcagcgggcacggccaacgagctgcgggcccgggatcgcggcggctggacggggctggagctgtcgggagggcggaggtgagttctggggcgggggctgccgggcgccccgagtggagaaaggcgaggaggtttgccgtcccgggctgtcggctgagaccccaccaaaaacctccagactttgtctggtggggacagatctgcaagcccctctctgcagcgtggctgcgggctcgggaaggcacttggggcagcgaccttggtctcccacctgggcttcgggggaccacctcccctgtccctcgcacagctgctcagaggcttaggctggagaaactcctgtgtcttaggggctggcaggactggtgtgggctggggcctgctccagggagccaaactgagggacccggtgcctaggtctgaggtggaaacctgggagttgagtgtatgtgtgtgtgttggggggtgcctcaggggtcccaggccctgtggtcccgaagcgcaacagagtactgagtggcccaggtgccagggtctgaggctgggacctggtcttccgggccagcttgaggtccaggtggggtggggtccaggttcccgctagggcagtggagcctatctgtgaggttagcgtgtgttgatgagagagactggaagggagtgatcacgaaactagggaccctccggagagcagacgcagcgcaggaatcccaggccagaggggtaatggggggctgtgggcagagcatgggaggggctctgttgtttgtgaactggctgctcccatgatgaggacccaagggggtgcggcaggatgtatggaaagcaaagatgaggacagggaggggccatgggaggccatttctgtcactccctgccccagcgcaggatggggcagccacctcactcagccacacatggtcccatcttcttaagggctcctctccagaacagagtggggcagccctttgggtgccgtttctgatctgtgctttgggccctggttggcccagtctgtggcttggaagaaacgcctgtggcctcacttagcccgctgacggagtcctgttccattacagggctggctgggtgctgagcagagagcagcaggcggaagaggcagggtcctagtgaggaggggagctggaatgacctgggtgggctctttgtctacacaggcatcgtgtggagccctgaaacccagaacactgcattcccatagtgctcctggggacatgagcgcccagctgaaacaccccacacaggaagagatcctccgaggattctgtcaggcaaagggttgggcccctgcaaggtggctcacgcctgtaatcccagcactttgggaggatgaagtgggaggatcgcttgaggccaggtggtcgaggctgcagtgagccgtgatcgtgccactgcactccagcctaggcaacagagcaagaccctgtctcaaaaaaaggagcgggagtgggggcagggttcgtcctaggctattgtaagaccaggggatactctgggatgggagtctctggttgtgagttcctgctgggccacaccctatcctggtccccagtgactaatcggccctgcctattgggtagaagtcagggccaggggtcagggtgaagctgatgactagaggtcaatatgaagccaagagttaggggtcagtccatgggcagggttagggatcaggctggggccagagtttggcatgtgcttgtagccaggaaatggagttcctttctgtgtaaatcaaactgtcccactcaattactctcaaacccataggcaccaccagtctgaaattagtaggcccctgaagcggggctcagcctcccctcattttcagctgtggactctgcccagacctagctttcgggagctgggcttgtcccgtgttctgtggtcagcactctccttaagtgtccctgggtgtgtgtgctcgcttggcagtcagccacctcttggcttacctccacctctcggggaatccgtgggatcctccttctttaacacaatttttttttttttttttttggagacagggtctcactctgtcacccaggctggagtgcagtggtgtgatcatgacttactgcagcctcaaccttccgggctcaagcaattctcccacctcagcgtccaaagtggctgggactctaggcatgcactaccacgctgggctaatatttgtatttttcgtagagatggggttttgctgttgcccaggctggtctcgaactcctgagctcaagcaatccacccactttgacctcccaaagtgctagaattacaggcatgagccaccacacccagcccttaacacagattgatttagttcctacctccttccttaaagaactcatgatgactagaatgcgattctcagtaagaccaaaatatctaacaagaaaattcagaatctgcatcatgaagggaaagaacactgctcaaacctgcccaactccctgcttttatcaataccttgcatatctggacttgttaacataagccctctgtgtcacccattctacaggaaagggcactgaggcacagagatgtggcatgatgcactcacgctaggtgccataataggctcttgccatccctgaaaccccagcataggggcactcagcatatcgcacaatgagagacggtagataactggacaagcttccgatagctgggaagagtataggcccatggtttggatgtggaatccagtgtagagcgaggactcagtcttttttttttttttttcttgagatggggtctcactcttctcgcccaggctggagtgcaatggcgcgatcttggctcactgcaacctctgcttcccaggttcaaacgattctcctgcctcagcctcctgagtagctggaattacaggcgtctgccactacgcttggctaatttttgtatttttagtagagacaaggtttcaccatgttggccaggctggtctcgaattcctgacctcaggtgatccacctgcctcagcctctgaaagtgctgggattacaggagtgagccacggcgcccggcccagagtcttttttttctggtggttctaggttgtttctcctccagatacaatagcctcggtccagaaaatccattcattcattcaacaaagtggttccccagtgcttagcacagagcctggcatgaagaatctcgataagtgtttgctgaagaatcagaacaacatacaaataaggctgccagctcctccctcgagaccttgatccagtagtatgctggttaatggtttccaatcagctctggaagaaggataaaatcctgatttatggtgtttgccaatttctgtcttgtaaatactcccagccatgactgatttgaagctaccaatgtgatgtcattgaatgcagaattgggaagagatagaaagaatcagctcgcatgagctggtgggacccagctcagcatcccactccatcatcctgagctgggctctgggctcctgcccctggctcctaagaaccctcccctccccctctctgtgctttcccttttctcctcaacagccagctgctatatgcatgcccacaaccagcacccatccttcttctgattctgattcctgagcatccaactccaatggtacagaggacagcaagagtgtctggaaatctccatggtgctggccatgcaggagaatcctggacatacaagagtgtgtgggagtccaggtgtctgtccacaatggggctggtttgtgtgaactgtgtgagcaagggtgtgtgcatgtgtctatgggcatgccagagccagctctgtgtctgcctgtgttctatagcaaaactttcagattgggccgctggtgacagagaaggaatgcattggccctgcgtagcctcctcctttgtttagaggagcagccaggcccaccaatgagaacatagtgtcagtggtctgcagactggctgagagacactgttgagcaacacttctcaaacttcaatgtgcacctgaatcacctgggaatcttgttaaaataggccagacgcggtggcttacgcctgtaatcccagcactttgggaggctgagacgggcggatcacctgaggccaggagttcgagaccagcctggccaatatggtgaaaccccgactctactaaaaatacaaaaattagccaggcatttttaggtggcattttaggcaaattaggtggcgcatgcctgtggccccagctacttgggaggctgaggcaggataatcacttgaacccaggagatggagattgcagtgagctgagaactgagatcacgccactgcactccagcctgggggacagagtgagactctgcctcaaaaataaataaataaataaataaataaataaataaataaataaataaatatgaaatacatgttctgattcagcaggtctgggctggggcctgaggttctgcatttctaacaagcttccaggtgataccaatgctgctgatcctcagcccacactttgagtaacaaagctgttgatggtttgaaatatcctgcctatagcctggccccagaacttcatagacaggatcgagcccctcccatcttagaaaataaatattcttcctcacctcccttcagctttagcgccctccaactactgccctcacatgtattcctgatttcagccaagcttttcagaaattctagctcaatatgattgcgtcactacactccagcctgggcaacagagtgaaactccatcttaagaaaagaagttctagctcatgtcacctcttgctcactcctcacctaagcttacctcccttgggccactaaaacagtgtttccagtctcatctggggaccttttacagggatctagctttacccatctcttggtacaatcttcatgagaccatgaggcatctcagtctcctgggccggtatatattcctctgttcagcctttaaatgtaggttctcctcgtgacagagtgacaccctatctcaaaacaaacaaacaacgaaggccaggcacggtggctcatgcctgtaatcccagcactttgagaggccgaggtgggcggatcacctgaggtcaggagttcgagaacagcctggccaacacggcgaaaccccgtctctactaaaaatacaaaaattagctgggcatggaggcactcacctgtaatcccagctactgaggaggctgaggtaggagaatggcttgaacctgggaggcagaggttgcagtgagccaagatcgtgccactgcattccagcctgggcaacagagtgagaccctgtctcagaaaaaagaaaagacaaattgagtcatgcccccaccccaccctgccacctcaaacctttcaagatttgctgttgcccttcatataaaatcaaatctgaaatagggtgcacaggccctgcctgcagggtaagcccagcccagccctctgtccagacttaccatgtcctcttcccaccccgcattatccaactttgaccttcctagcactcagcaacgcttgtcatttcaaaatcacttgcctgattatctcctccatcagaccgttggtttctagggcagggacagtgtctctctgggtcactatctcccagcacctggcacagagcaggcaccagaaaacatttaggaggatcctgattccaagaaagtaaagccattttttgacacaagctgggaactgtgggactttagatgagatttaaggaattactgttaatttcattagacatgagaatggtgttgcgatgacattgtttaaaacgtctttatctgttggagagatgtattaaagagttcacgggtgaaacaacatgatggctgggatttgcttcaaaggactccagccaaaagtaaacaaataaaataaataagcattcagatgagggaacaaagggacaaataaatcccactctgcttgtctgttcctgttgacagctacagggcctgcaaggatgttggctgtcccggagatgggcctgcaggggctgtacatcggtaagaacccccaccattctgccctgacccatcacccactcacccgagcaggcactgagacccacctacaggttgtgcaatgtacctctcccacagagcttcccaacagctcttctgtgagtgagtgtgtgtgtgtgtgtgcatgtgtgcagggcaggtctgtgtttactggacccccctgtgtgtgcagaaagggtctgtgtgcaccggtctgtgtatgtgagtatgtgtgcacacaggactggtctattcacaggaccctcatgtgtatatgagtgtgggctgagtgcgtgtgtttgtgtgtgccagaagggtctgtgcacacaggagtgtatgcatgtgcgtgtgttttgttcaggctctgtccacaggaccctgtgtgagtgtgtcagtgagtgtgtgtctctgcgggcaggtctctgtgcacgggatctgtgtacgggagtatagtctgcaggtgggcatgcatacagagagttctgcgtgtgcatggagggtctgtgtgcacaggagtgtttgaatgtccatgtgttttgttcaggccatgtgcacaggaccccgtgtgagtgcatcagtgagtgtgtgtctctgcgggcaggtctctgtgcacaggatctgtgtacgggagtatagtctgcaggtgggcacgcatgcagagagttctgcgtgtgcatgtgcgtctggccatagcctggtctgggagcaggcttgggttctccgcaggggtgggaggccggaggcaagagggacactcctcaggaagtccattcacaaagacctggtgggctgggcccttccttcctgcctcccttcccaagctcgagccacagcaacttggcctctcgggctgcagctggtggcagggctggagcctgccctggctgcctgaggagagggagcccttgaaatgtggccactttttccctgcccctccagcacctcagactctggccctgtccaggcgcttcccagagtccccctcatgcctggcccttcgcctgtgttcccaggttacccccaaggccagggagagtggagacctgcctggcagcacgtgacaggactgtggctgagggagcacagggcctgcctggctcagcctaaggcgagccagacctgcctgatttgtccatggagcttcctaccagatctcactctccctccctagccagcctccctggcctgtccatggatatcaaggctgccccagtactcctcacatgccccttagcaatgcccagtgtggtggtggcagctaccagccaggcaggccctcctgccccataagccgcctgatcctcggggcgaggcctggggctgtcctccagggctactccactccctcccaccaaaggtccagctcagtcccaggcgtgcaagagggtcttgatggggcgtcctgccctgaaatgctggctcagggtgtgtgtatgtgtgtgtgtggggggtgggaatcagacttcctaatgttgtggacacccccagttcaggactgggctatctctatgggtgtgggaggaggtgctccccctcctcgatcctcctcaagcagccagctgggcctgtctgtggcccttgtgggcatgggagctgcagagttccctcaagtcctgattagaaccacgtggcccaactttagggtggaggggagcaaccccacctcctagccagttagctctgtagctccaccttttgaaggaggagggcttctctctcctctactccctcccaggagctcacctgccctatctcccctgcccttccatctctggactgagtctccctgccacacaatgcttttctgtctctctcccctcccacactgtgtgtctgaggggccctagtggggagacagtgagctcctggggaaagcatgggtcatctgctagggaaacgttgcctctgacagcagaccctcagctcctgcccctgcgtcatgtgtgtctttcctacaccccgcagtcctcctccccagcagagagccctttgccttagcccagcaaggactgatggagaacctttgggtgcctggcttggggccccgctgccatacctaccctgcttgtgccaggatgaactgccgtctcttctctgcaggctccagcccggagcggtccccagtgcctagcccacccggctccccgaggacccaggaaagctgcggcattgcccccctcacaccctcgcagtctccagtaagcccagagcagggaccaggtggtgggtgacctggctggtgtggacagggtcgtgcgtggcaaagtcatgacagggcctcagctaggaaggaggaggggatgggggtagcaccatgcctcttgtccccgtacactccagtcatgtgccccccagaaggattggccttgggtgaccctggactataaagggtaacaattctactgagaaggcgagccccatgtaactaactcccaacccccccacacaggaggcacccacggccattgaagctggcctggctgaggcaagtgttcccctgagcatgtggcttttctaggtccccagagcactgggcctcttgtggaccacagcccaccttaatccaagtcatatctgaaggagaggagatgtgttgccaaaaaaaaaaaaaaatagtctggaaaccattagcttgggctgggcatggtggctcatacctgtaatcccagcactttgggaggccgaggtgggcagattgctttgagctcaggagttcaagaacagcctgagcaacacagcgaaaccccatctctacaaaaaatacaacaattagctgggcgtggtggtgcacacctgtaatcccagctactcgggaggctgagggtggagaattgcttgaacctgggaagcggaggttgcagttagccaagatcgcaccactgcatttcagcctaggtgacagagtgagaccctgtctcaaataaaaaggaaactactagcttgaagtatccaggacaccacctccccacccccaagctccctgggtcaccccacctggatgaccttgccctggtgatccagcttagggacccccttattcttaggggagtccagccctggcataggagaaggcacacacttctctggggacatgcacgtgccctctcctctctgccacagaatcagacagtctggtttgtgtcactatggccacaaagagcaagaggataaaatatatacactggtccatgtgctgtaaaactgcctggaggagcaaaattgctcccagctgggcccagactaatggctgcctatgaagatggtgtgaggtgggggtggggctaaggcagtccagagggagggtgggcagaggctggaagcaggaaagcaggagcttgagccaaaccctgcctggggctacctgagagacacgtccaaggctcagcctggagcctgggagggcaagggagcccgagcaggtgggcaggtggggtgggccaggtccagggctggtctggaccacagtcagtggaggggagtgtcttccccatgcagaggaagcattggggctgtgggggatgggggtgtccctgctggctgcttgctaattctaagtcttgcacttgcagaaacccgaggtccgagccccccagcaggcctccttctctgtggtggtggccattgacttcggcaccacgtctagtggctatgctttcagctttgccagtgaccctgaggccatccacatgatgaggtgaggtcggctgggctgagagagtgaggtggggaaggtggggagttcctcataccttggtcccaaaagtactgtcaccgagacatggggtctccttggaggccctgccacccccagtctggggctccccactggggtaaaagttggaggatgggccccaggcctgggtccttggcctcaactggagcagctcccaaccctctgtaggaaaagtcagactttgtttttaattttgaatttttttgagatataacaaacataacaataaaatatgcaaatgttttttattttccttttttttttttttgaggcggagtctcactctgtcgcctaggctggagtgcaaaggcacgatcttagctcattgcaacctccacctctcgggttcaagcgattctcctgcctcagcctcccaagtagctgggaatacaggtgtgcgccactatgcctggctaacttttgtggggttttttgtttttttttgagacggagtctcactctgttgtccaggctggagtgcagtgacgcaatctcagctcactgcaagctctgcctcctgggttcatgccattctcctgcctcagcctcttgagtagctgggactacaggcgaccgccaccacacccagctaatttttttttttttttttgtatttttagtagagacggggtttcaccgtgttagccaggctggtctcaaattcctgacttcgggtgatccgccagcctcggcctcccagagtgctaggattacagatgtgagccaccaacctggcctttttttttttttctttgagacagggtctcgctctgtcacacaagctggagtgcagtggtgtgatcatagctcactgcagcctcaaactcctgggctcaagcaatcctcccacttcagcctcctgagtagctaggactacagacagcaccaccacacctggctaatttaaaaaaaaaaaaaaatttttttttggagagacagggtctcactgtgttgccagggctggtcttgaattcctggcctcaagtgattatcccactttagcatcccaaaaatgctggaattgcaggcgtgagccaccatgcccagcccacaaatatttttctaagcttgtagacaaacacacacatatacaaacatatatgtgtttttttaagtaaaagtgagatatacaacttgctttgttttaaagcttcaacactattttgtagatatttcatgtcagcacatacgaagctaccactttctttgaacggcctagtattccatagtacagatgtgtcataatttatccattcccctattgacagttttaggggggttttttcctcctctcatttttcactattacaaaaagtgcagcagtaatatccttctttgaaaacttgtgccgcaatctccatggggtagattcctagaggtgattcctaggtccaacatctcaaatcttttttcttttccttttttagtaaaaaggaaaagaaaaaataataaaacaagaaataaaaataaaaacaagaaaatgaaggttctaagggctgagttgacaagtcacacagttgttttgaaagacatgtttcaaaaatccattcaaatgttgggttttatgtgggacctcaaggaccttgggacctcaagaccccagtcctctgaatatgtcctagagggtcggcaggcagtaggtgaagctacaggagacctcaaagctctcaacccagactgggatgggaggtaagaggggcttcccaaggcctggagactggatggaagggtgaatggagacatagacagacaggtaactgctcccaaaatacatgggacttgagcttcatgagactggactgtccttccttccacatcacaggaaaccacaaaggctctgagcacttacagccctctaggagctgcagggcatcccagatgtcttgctgatcaacacacatggctgaggccatgctggggctaaggacacatccaggaacactgtctctgtcctgtggaggtgacagtcacaggaaataactgggggacattccagcctcctcccaagctctctcttcccaccagacaccaagcccctaacatctctagaatacccatctacttctctccatggccactgatcgtgcccaagttcagccccgaccttctctcacctggatggctgcaatatcctcctccttggtttcctttctccatgctcccttccctgcattctgttgctccatgggagccagtgacctttctttctaaaggcaaatgtggtcatacctcttggctactttaaatccacgaagacagaattctgaatggccttctgtgctcttcatgatctcaccttagcattcttgtgttttctcctgctgcctatggagccgacccatagctagttctccctgctctttcacatctgtaagtttttgcacatgctgttccctctgcctggattcccacccaagaagggagggttgcactgactgccctgtgcctccgcaggaaatgggagggcggagacccgggcgtggcccaccagaagaccccgacctgcctgctgctgactccggagggcgccttccacagctttggctacaccgcccgcgattactaccatgacctggaccccgaagaggcgcgggactggctctacttcgagaagttcaagatgaagatccacagcgccacggtgagtcacagggctccagacagggaggcggggccagcatggaaaagggcagggctaatgggggtgggtgggacaaaaccaaaacgtgtgaggaccggcccgatggagtcgtggctgagagggggcggggctaaagggagacgtcggactccggtgtgggcggagctcagaaatgaggtggaggcggggctaatgtgggtggggctaatagtgaagctggggttgcaggaggggtggggctaaggagaggggtcggggcagagctaatgtcacatggggcaagagtgggacggtggtaaagaggaggggaagctccaggaaacggggtgattttaagagcgaggtcgtcaggaaatgagtgccaagctgaggcctcctgcagagccgccctgtgtccctgccaggatctcaccttgaagacccagctagaggcagtaaatggaaagacgatgcccgccctggaggtgttcgcccatgccctgcgcttcttcagggagcacgcccttcaggtgcgctgcggccccacctctgccgactgtggcagggaccccctattttcccctcatccgaaaccgctcccccatcccgtccccgacattggatgggtagccaccgccggagctcagaggtcatcttctccagtaccctcctccctttttgtctggtagagcctgcaccaagccatactgatgggaggggggccgattcttccagctctgctgggaagtccttcctgtgatttgattagtacctccagttccgcagagggctgaagaccaccctccctccaagccagctttcctctcactgccccctcctgtaccaggagctgagggagcagagcccatcgctgccagagaaggacactgtgcgctgggtgttgacggtgcctgccatctggaaacagccagccaagcagttcatgcgggaggctgcctacctggtgaggacgtgcaggcgggcccgagaacactgctcaggaagggccaggcctgtccccatgcttgcatgcaccccaccacccttgagaccacagagtcattgtggaaagaacttcagcctgctcctgatgggagtttgtagagttgctcccaccagaagagggagtgggcctgcaggaacaggggacagagggacaaaagacacagcccaggccagtgtagacagtgccttaagtcaggtgtcctaaaagcagagcccaagatggagagtctttttttttttttttttttttgagacagtctcgctctgtcgcccaggctggagcgcagtggcgtgatctcggctcactgcaagctctgcctcccaggttcacgccattctcctgcctcagcctcccgagtagctgggactacaggtgcccgccaccacgcccggctaattttttgtatttttagtagagacggggtttcatcgtgttagccaggatggtttcaatctcctgaccttgtgatccgcccgcctcggcctcccaaagtgctgggattacaggcgtgagccaccgcgcccggccaagatggagagtcttatatgtgaggtctattgaagaaggtttctcaggagaaaggcgagggagggaggcgggacaggagaaggagctatgaaggatgtggtctttgctggagtctagcctcaggtttagcctcagctagatcccatggggagctgcagagggagaactgtagcacagagttggggccggcttcttgcacatccgtatcggtctgtcactggttctggggaaatgggagggaaacctctccaagtgaggccattcccattcagctgagggcagttatccagaggaggtagcagctgtgagccaatagcagccaacactcacagtggcaggcagggcacccagaacattcacttcacttggcatcagtattttgagggacacccccaccaccgcccacctttgttggttcttgagcaggggaaataggactatgaaataaagggaggcgattctagccaatgcatacaggtcttcctaccactgagatgctcaaaggtctagagcaaggagttggggggggctcccgtggagacagagagggcatagcctcaagactcattgcttggtcgtaaccctagagccttggatacagaccctaagctgtccaaaagggatctcaagcctgcctgtggacaccctggagggacccccaatcctcccatacctatgggccaggcatgacccagggccaggtctgtaaatgtctacacttttcactggaaggagctaaccctgagcacagtggacatccctgtgcaaagatcaggacggaagcaaggctgtccccagccagaacaaacacctgctcccccagcgtccccttgcctattttcccaccctccttctcacgctgttccctggctgctcaggaaagtctggccctgggtaaaagtctccattcacacccttatccctctcccctatctggtcagaatctggggaaccctacaaaaccataatatacttcccacagggatcccctaccctgaaggaaataactccagatctcaagtgtttttctccacccaactggcctgtcttggtgcctggaatttcagcttcctccctgctgtatcagattccctgggaacaaagttctcctggaagtggggtggcctatggctaccgtctgacaccagcctagtggagaaagagggttcaatgagctaaaagggctccccaccacctcctctgagccatcacacacccccacattgtgctagagtctctgccaatacccccagccagcgctcagctggccgcttgtacctgtgaaggggaaccttgctgcagccccgctatcttgggaaatttgaaggggcagatcccaggggttctaggtctgcattctgtctagagtcttttcctgctgggcaacttcttggcatatttggccagggccattccctccccagcctggtcacagcgtggctatgaggcagctccaaatttgtgcagcacagaggggcctgagaggcctaacatgggtggggtgtgatggaggaggaggtgggagccccacaggccgcggttccccacctcacagtgccatcttaggtgtgacagcccacagtgctgcctgaccctgcccaccacccatccccaggctggactagtgtcccgagagaatgcagagcagctactcatcgccctggagcccgaggccgcctcggtatactgccgcaagctgcgcctgcaccagctcctggacctgagtggccgggccccaggtggtgggcgcctgggtgagcgccgctccatcgactccagcttccgtcagggtgagctgcccccggggacaccacccacccctggagggtcagagggtcactgaagccagaagctcagccatgtctagtatgaaggggagagggtacccaccctggaggagcccaatttgagcaggcagaaacatggctggtggagcctgtctgaggaagggaggcacagccctgcccaagggcaacctcgtctcagggtgggacatgccctacctagggcagcccaatctcagggtggagatttcaccttgccctaggggagcaaagtctgaggagggcaggactccgcccagccctgagtctgagggttgggggagacacagactaccccaggaggaaactgctggggtactgacaaaggaggaagtcagcccactgcatcagctgtccccttcactcccctcatcttccccgacacacatcagccccaagctcctgctgccaggaccaggcacccaggccaaggacagctatggtcatcctcccaaatgccatctcccagggcagggagaagccctaagtcctgagtcccctctgagactccaaagacctacctgcctccgctcctccaaacccctctaaccctgattttgccatgacctgagacctcctgcgttaaaggaaggccctgtgtccataaatatttccccacagctgttggatacagggtgggagtttggggttcaggattgccctctcccagtcaggagcaggttggagtttcaggagcactggctgctcccagtgcccatggaggtcctgggcaggaggatgggagttgaacgccatagctggagcacctccttctaatctcactccctgctgtctcctgacccccagctcgggagcagctgcgaaggtcccgccacagccgcacgttcctggtggagtcaggcgtaggagagctgtgggcagagatgcaagcaggtagggggaaagggggacggagtgttatccttggcccctaccgggcaccatatactgatggggggaagggcatgtttgcaaagcccgtctcttcctcctccattcgctgtacccaacctggccgtcccctcacagtcacccgcacccccaccccactcacagcggcgcccctaactcccactcctccaggggattctccgcggacgctcgggtggagttgcagagcctctggaaccatttctgccccacaccctgcgcccatatgtggtggtctgaggttcaagcacctgaagcccctcacgtccctcccccgaccctgcagacaggccttgggacccggggcagggctggaggctgggcgaggctggagggggcgcagggctgagggtgcgaggccgcccacgagtgtgtgcccgcgctcgccgccgcaggagaccgctacgtggtggccgactgcggcggaggcaccgtggacctgacggtgcaccagctggagcagccccatggcaccctcaaggagctctacaaggcatctggtgagtagccaggcggcgccccggtacccagcgcgacccgggctccggccccgccactgccccctggcggcccggcgagcgctgacgccctcttcgccccctgctccaccccagggggcccttatggcgcggtgggcgtggacctggccttcgagcagctgctgtgccgcatcttcggcgaggacttcatcgccaccttcaaaaggcaacggccggcagcctgggtagatctgaccatcgccttcgaggctcgcaagcgcactgctggcccacaccgtgcaggggcgctcaacatctcgctgcccttctccttcattgacttctaccgcaagcagcggggccacaacgtggagaccgctctgcgcaggagcaggtgggtcctgagcccgcgggctcaggcagggtttgccgacccgggaatgaccgtgcactggagggtcccgggccccaaggaacggtgggggtctgcctgattcatcccacatatacactaagccagcagggcgtcggggtggggcggcggggagcggcgagtgagtgccccagcccagcaggctccacccacggaatccgcagcccgaactggggcaagacagagaatcatagcggggaggcggcaatgcctatctcctcccagccttctctacacccccaccccgggccctgcgggcccatgctcctcggtttccctgcaccaaagcaaggggaggcccctcccaggacctcgtacctggaacctggagcaggctggcaactaaatcctctgagtgagtagggtggagataagggactaacatcccgcaggtccagtcctccagacaccacgtgcagtcggtgcccaggcacttctgcctggaggcagaggtagagaataaggaccacggaccccaaactggggcaagcagctgggccctgaccgatggatatttgcccctttcaccaccaacagcgtgaacttcgtgaagtggtcctcacaggggatgctccgaatgtcttgtgaagccatgaacgagctctttcagcccaccgtcagcgggatcatccagcacataggtgagcacctgagcttggtcccccacccgcccctacatgaacaaacagatgcagaataattcccccccatcagtgcctagatacctccacacatccatacactgtgatgagacctagaatcatctagaacacctgcgggatgaagtgcagtggtgattaagagctagagggttgatatgtagtcttgccaaggcaaaaaacttctggtgcctcagtttccccatttataaaatggggtgatagtattgggttctcaaaacgttatcacagggataaaatgagctgaagtacctagagtgagcacaatgtcttgcacacaatgtctaggtgtttaatacgtgtaaaatgcatatccttatctctcgtcctccacgtcgtggtgggagagaagtggggagcgtgagtgttggggaggcgaagccctcgaggactcccgtgagctctcaaagaaagtgctcaaatggctactttctagtcgccaggtaggtacaggctagggaggggaggcgccggtggccgcctagtggtggcctcagtggctctctctcccccgccccttctcctctgcccccttcacccgcgtccccccgtcctgtcccgcagaggccctgctggcacggccggaggtgcagggtgtgaagctgctgttcctagtgggcggcttcgccgagtcagcggtgctgcagcacgcggtgcaggcggcgctgggcgcccgcggtctgcgtgtcgtggtcccgcacgacgtgggcctcaccatcctcaaaggcgcggtgctgttcggccaggcgccgggcgtggtgcgggtccgccgctcgccgctcacctatggcgtgggcgtgctcaaccgctttgtgcctgggcgccacccgcccgaaaagctgctggttcgcgacggccgccgctggtgcaccgacgtcttcgagcgcttcgtggccgccgagcagtcggtggccctgggcgaggaggtgcggcgcagctactgcccggcgcgtcccggccagcggcgcgtactcatcaacctgtactgctgcgcggcagaggatgcgcgcttcatcaccgaccccggcgtgcgcaaatgcggcgcgctcagcctcgagcttgagcccgccgactgcggccaggacaccgccggcgcgcctcccggccgccgcgagatccgcgccgccatgcagtttggcgacaccgaaattaaggtcaccgccgtcgacgtcagcaccaatcgctccgtgcgcgcgtccatcgactttctttccaactgagggcgcgccggcgcggtgccagcgccgtctgcccggccccgccctctttcggttcaggggcctgcggagcgggttggggcgggggaaacgatagttctgcagtctgcgcctttccacgccctccagccccgggggagataaggtcatgggagagtgggtggggacacacccagagactggctttgggattgggcactggtccgctgactgccaggctgaagggacccgccaaggactgaacgggtaagagaagaggtttgcaagacagagcgcgcagcccggcaaggggcatgtgaccccgaaggaagaacgcaacagaagagtcctggtctgaacttggccgagtaggggtgggggtgggatggcaggaggagccgcaggaggaaggaggttgtgcagggtctggacctgcagggctgaagttcactcatcgaccgactcagccccaaccgggagccaggcagaaaaaccctgtgccgtaggaaagtgactggaagtggactccagagggacaggtgtggtggcacagtcctggtgtggtgctgaccacccaaatatgactgtgaattgtggaaagggcagtagatctctaatgtggaggtgggaacattattgtggtggaggcaattatgagggtagcatttctttcgagacaaaacacccgtctgggaaggccccaaggtcagcttatgaaggaccccacttgcaccccaccccagccatggaagagcagctggagggtggatggggaggccagagggagcaatgaggggtggtcccagctctgctattgactcggtatgcctttaggacattctcttaccgctcatgggcctcagtttcctaaagtgtgaaatgtcaggcacttccctctaactggcatgcaacagccccacctgcctgagagccctgaggtgacaataaaacatttatgctcaaggggaagccacagcctgctgatatggcgtggagaccctaatagtgggaggaatgcaagggttcccggtgctagagagagaagggagaaagctttcagctgtgcatagggaactgaccagaagggggtgctgctgtctcccatcaagcatcccaaacaactccactgcttaagacctctctggcctacacatgaggtccctctctcctcattcaaattaattgtcttggcagccagcttctggcctaaaatgccaccacctgtgcatacctcttgtggggctaggtgctataataccacgcggtgcccctgcctcctgagtgagtctacccaagtctttccctggcccatctgcaaaggagtaggcattaccccaaccccagagaacaaaaatccacctggcctccggtatccactggaagtttatttctttagggttctatcccaaccagtcgcttaaaaaccaagtaacacagacctgaggggtgggggctggggactgcacctccctcctactcatggtggacagcagtggggactagggaggggcaggagaggtggctgaagcaaggcagcagtaatggggccacgacgccacagagccagctccgtcctctcccagaccctggtgggagtccctgtggcttggggtggggagtgggggacccaccccaggccctccctctcccttcctcagacagcctcctttcgggctcaacccatttcttccggcaggagactgaggcacacagagaggaggaagtgggagaggaggacgagggaggggcagggtggcagcacaaatgaaggcagaggtgagaggcgtgggcaaggccactccacccccacacccaccccagagaggggcgaggaagccacaccatcacgcagcatgtcggggggacaaggcggggtttaaggctgaggggcccggggcaggcggggcctcgggcctcagtcaaagccgtgccagtcgctgtgctctgagtcgtattccagctcggcgcccacacacttgacaccatccagcagcatgggcgtgccgtggtgccggtctgcaaggcagggtgcaagtcagtgccatgctggcccccggccccacccatgcggcccactaaggggacccctccccttccctcagggatcagctggaggtagggacctgccaaggaggttgagaacccctgagccgggcaaggatcccttgttcagccttggttccctgaggaggacagaaaccctcgcagtcgagcttgtgcatccctcctccaaccaggagcctcacgctctcacccatgacgcgggcctgcaccgtcacgcgcacacaggtgccagtgccaccttcgcaggctagcagtatctcctctttgaggacgccctctttgtgcgccgagtactcacacttgacactataacctgcccggggacaggggcaattggtcagcacctcccccagcctccccgatcctgcccctggcactcacgggcccctacccaccaccatggggggactgcatgctaagcccccccaagaaaggggcagggatggcccttctggagcccagagacccattccccctagcaggggtgcacaggtctcaaaaacccattcttcagtgagctggacatgcctccagcctgtgggccaccccaatgtggctccaagagtgaatgaagtagggtccaattcaggcttccaaaagaaggtctggctgttttctcccaaaaggaaggcagggagaggcggtgatgaggagtgaggggggcagggcagggtaggctttgagcagatccgatggcaagaggtaaaggcctgaggggtgtcaatccattgaagggcaaggtcatgaagaggctggtgacggggacatgaaactgaagctggagctccacgaaactgacaccctagcctctgccaggctgggagtggggcatggggcagggcctgaagtgagcctgataggaacagcagcctgaaacccaaggtctgggactggtgggtgctaggagttatccacacggtgtgtgtagctccagcaggtttttctagagggttagggaggcaggagggaaggctggaggcttcaaaccagttcctcagcagctcccatcttggttactgccccacggaggtaaccatcacaccatgggcaggtacagggaagtatgagctcatggacttctgttcaggacagggagcaaggcctggagtgtgggacctgccatgctgccacagtgcaagctcacaaagaggtgccacatccccgacttgctgagctgcccatccaccctagttggaagtaagggagcaccccatgttctcactcccacacccatccaggccctgctggaggaggggacgcaccttcagggacgggcaccacgctgaggagcttgaggtgcaggctggggacaggtgcctcgcggacatccttgctcagcctgtgcactgggggcagagtgaaggtaatctcatacctgtgcaggatcttcaggaagccaacctacagcaggagaggtgagggagggaggcaccttcacttcctgcttcccgcaggcccacccagttgtgccacctatgatcccatgcgccccagcacctgcttccccagagagcccagaaagcccaactccctccatcactccagctgatcgacccccagcccagtggccccagccctttcacagaccccttgagggtcccagccctacagcttggccagcaagatcctcagcatctgtctcacgggccccaaagtcctcagtggctcatttcatagacaggaaaatggaaaccacaaaatgactggccaaaggctatgtagtgtggccagggtcaagtcctccctagacttcttggccattcctgctatgcatggcacccagcaaggcaccacccactgcctacaagggaaagttcaaagtcccatgggtcattcacctgtccccatcactgccagtatcccagggtcagggatgctggtcctccattcgctcataggatgacaccaggccacagatagcgtgggatgagggatgggatcaaattagagatatgacagtagaccagctgtgtcagcccagagctggcccacaggcctggcaccagccactgaactggggctcctggctgccctgctggcactggactggggatgcctgcctgcccactcaaaggctgtgtccaatggcccatactcacgacccaagcaatttctgttgttcattcacagtgcttggtgacaaccaccctctgggacaaatgccattcttggaaactccagtagtatgaagggtcacaagccagggtggttgctgagcaggggggctggtgggggtgccacgccagcaggcaaagggtgcctgctgtactcccagcttgcatgggcacacagagtcctgctcacagttactggggctgggcagccccatccctgggggccaactgggactggctgcagagagttttagccattcaatgggaccaggttgatattgctacatgacaaacttcaatccatgtgcccccctcatgctctgctggtagggggcacatccctcaagaaggctttctggctgtacctgctaactgtgaccctgtgacccaggggtactacttatagaattttccaggggaaatagagatgtgcagaaaaatactcttcgctgccctatttataacaatgaaaacaaaaacagccgtaacacccaggaacagggagccagctaagtcaatgatgacacgtatcatggaccagtaggcagttgtaaaatctcgtggaaaattatttactgacacaggtaggagacagttcacaacagaagcaagcaaaaaccagtgtggacacggtgaggccagcttttgtttttggaaacaaagctttttaaaataagctggatccatcaccatagtgttttcagaaaaataaataaataaataaataacattttaaaaagctggaataagccaggtgtggtggctcacgcctgtaatcccagcactttgggaggccgacacggacggatcacgaggtcaggagatcgagaccatcctggccaacagagtgaaaccccgtctctactaaaaatataaaaaattagctgagagtggtggcacgcgcctgtaatcccagctactctggaggctgaggcaggagaattgcttgaacctgggagctggaggttgcagtgagctgagatggcgccactgtactccagcctggagacagcaagactccgtctcaaaaagaaaaaaaaaagctgaaataacacacatcagaatattaaccatggttattttgggatagtatgactgtgggtacttttaaatttcttcatattttctctgtcttccaaattttctcatgtctattaagacatgagtggattttgcaatgaggggagagagctatttttaagtgttggtttgttccatttactctcttggggaagctgtcagctgtaggacaaagagtgggaacttcagagttggacagaaatggatacaaacctgggccccccaggttcttttttgtttgtttgtttgagacagagtctttctgttgcccaggctggagtgcagtggcacaatctcagctcactgcaacctcagcctcctgggttcaagcaattcttctgcctcagcctcccaagtagctgggactacaggcgtgcgccaccacgctcagctaacttttgtatttttagtagagacgggtttcgacccattggccaggctaaacctgggccccttttgagcagcgcagcagaccccccactcagggccatctcaatgggccagacctcccccgacccaagggcactcctgttcaactctggacccctgatttattgaccaacctgaaggcctcagtctccattttccccaatccagctccaccaagcagaaaacagggggtgataatactacttcaaagagcctaactgagccagagatttggcaaagaagggttaaaaaaaaagttgcaccttgttattgccatagttagcttcacacctgtatcacatacatacattcttccattctcacaccaactctaggggatgtgattgtctccacttgagagaaaagaaactcaggtgaccttcccaaggtcacagagccagaatggctggcctagacctgaactcaggccactggcaccacagccacgacactgccttccattgctattgtctgggtgaagcagatgacagcagtggctctgctcatcttgatctggatgacattctaaatgctctcatctcattgaaatctcactgcctcccatctgacagatggggcaaccaaggcacagggaaaggcacagacatgcctataagcccggctgagaggaacggggataggcacccagaagccaggcagagccggggaggggaagaagctgctgatggggtaggtgtgcatgtaccttgaccagaaagctgctgtcactctcctgggtgaccatgaccaccgagtcatgcagcttctcatcaaagtggacgtggctgtgggatccttctgcatcgtggcctgccgcaaagcggatactccggactctgggcttgttgcctaggaagagtgggagagggctctgagggctttccctgtccccaggaaactcctcccccttgtcccctcgtcacccccaagactgcccttgacatcatccagctcccactggctgggctcttttcagggctagatggacactaggatcatgaggcttgaggcctccccgccggccccgacctgcccctcccacaaaaatccatcccctgagagtgagcgtggggggactcagggactggctaatatgacccttgcttggagggggtggggctggtgccagagccaggaagggacagtcttccagactcccaccaagccagggcagcgtgggactcagcccagtcctctggataccctgcccagtgctctccttcacagtgcaaagctccccatccctggggcctacccctaagctgtgtcagtgcatgaggcccctgcctgcccatcctcatgacccaaacctgaaagggcagggacaggaacaggctctgggggatctgcctggggtggcagaaacaggggggatcaaaaaacacactcaggccacctgggcgaggctgcagctgccagtaaacctcactggcccctggcagcaagaagagagaatccaaggaagcttccagacccacctcaagacccccttccttcctctgtctagcccaccatcaaggccctcagctgtctctgagctgggtcgggttctccaaggccagaaagggcagacggatgagacaggcagggtaggcgggagccgagctgaaggcctggactggatgaatgctcaggctgtagaggccgagagcacggccctagtcctctctgacccctggcccctaggccctcccaccaagagccctgcccagggtcctcttggcgggaggacctgatccagctttgagccggcctcttggatactcggaggcccaggggaccagcctggcacatccacaatccctggtgagccccacagaaccctcaaatctcaccagatcaccctggcctaaaaccctcccttatcccttctggactctgaaagaaacccaaactcccttccacagcctgctgtggccctcccacatcaccagtctcagtgctcaccataagcccctcggctcccccaacccccacagtggaacggcagggacacaagagcacacacctccacagaccagcctaaggagtcagcagggctctgcaggggtcctgctagggcttgcgtgagccccagaacctggcacaaacactgacatagtcccaatcacattcgcacaccagcacacacgcactcacacatgcacacacacacacacaggtggtgcgggccctacctgcagcaatggccctcctaccagggcccaccggaagagcttgtgcaagtcctaccacgccaggaaggcacttacccttgttggctgcagccatggacgccctccctgccacgcagctcctgccagacaccgccactcacgctcagcagcctcccatgctccagggacaccagcgggagcctgaaggatagggagtggggagggcaggggtcagggccactcatggacccatggctcagggacaccagaggagctccctttaggaaggactcaaacccctaccgctctcagcagcccaagtggtgcctgtactctctagcacgggggcttctgcccaccctctaccgactgcccacattcaccaagagccctcaccccttcctgataccccagtgactcagggtcctgccagcatgtgctgagctgcagcttctaggtgccaaagcaacagcataggactcctatccccagcacccccagagactggcaggaggggcagcctggaaaggaggactttattggtattttccagggaccagttctggtgctgctgaccccaaaggctgggcctggagctaccttattcaggtcacacaagcaatgcagctgggtgcggtcagaggcaacagggtgctcgatggtgggcaagaacaggggaccacataaagtaagcgtgcccttagagctttccctcctggtgatcggtcagggccatatgcaaaacagatgcctgtggagggggtgtgcccccacctgaaccccattcagaccctgccctgagtctcaggcctgcctccgcctcagctccccaacggcagcctcagcacaggggcagtgagaggcgccccaggaagcctccaatgggccgagctgggaccatctgagcatcaaaaagaataatgagtgcaactgatggaaacagatggaacacataaaagcagtgcattcacagagattattagaaaagaagagagaaagcaaaacaaacaaacccaagccctcaaaagccctcatttgtcaccactgacggtagcagtgccctctttactctgaaagctgaggattaaagaggaagaattcagcctgtctcttggcctttcttgtaaccaaattgccctggtggttgatggaaagctcttctttcggaaagaattcttgctaataaataacaaagaaatgaccaaatgctaagtcattctgcaacccctaaaggaacaaatgctggaggcaacaagaaccagtggatgctaaaccagaggggaaggttgacaggaagcagatactcacaggcgcccaagcgtcactgacagaggacctggtatggtttttgttttttttttttttctgagacggagtttcactcttgtcacccaggctgggatgcaatggcacgatctcggctaactgcaacatctgcctcctgggttcgagcgactctcccacctcagcatcccgagtagctgggactacaggcgcccgccaccacgcctagctaatttttgtatttttagtagagacagggtttcaccatgttggccaggctggtctcgaactcctgacctcaagcaatccgctcacttcggcctcccaaagtgttgggattacaggtgtgagccaccatgcctggccgaggacctggtgtttaagaggaatggcacaagtttgcaatggaggtatgtgacttctcccagtcacacactggtctatctctctactctctgcaggacagcctgtcacactgatgcctcctgaagtaaggcagcccaaagtcacagcatcactgacaagggattcctgccaaaaaggtttaacctggaatctaaaccagcctctaacttcaacttctcatttgctaaaaacacagaggagaggggaacaaatttaatgactccatgagaaagcaatgagacgagcccagaaggcaggatattctacaggatgactgacctgttttttgtttttgtttttgttttcaaatgtcaagaagaaaaagaaagcaggctgggaacggtggctcacgcctgtaatcccagcactttcacggatcacaaggtaaggagttcaagaccagcctggccaacatagtgaaacccagtctctaccaaaagtacaaagattagccgggtgtggtggcgggcagctgtagtcccagctagttgggaggttgaggcaggagaatcacttgaatccggaaggcggaggttgcagtgagccaagatcgcgccacggcacttcagcctgggtgacacagcgagactctgtctcaagaaaaaaaaaaaagaaagaagaaaaataaaacgagggagattattctagataggaaagcagcaaactacagctgattacacagctgatggtaaggttgctgcctgttgtgtttttgtttttgtttttgagacagggtctcactctgtccagcccaggctggagtccagctcactgccaccgtaatctcccaggctcaagcaatcctcccaccccagcctgccaagtagctgagaccacagccacgcaccaccatgcccggctaatttttgtagagacagagttgcccaggctggtctcaaactccggagcttaagcgatccacccacctcagcctcccaaagtgctgggattacagacgtgagccgccaggcctggcaaataaatttttgcaaataaagttttactaatagaacactacacttcattcacttacatgttgtctgtttttgcactaaaacaaagttacttccaagtagttatgatagagaccatatggcctgcaaagtctaaaccatttattatttggcccttcagagcaaaagtttgccaacccttgttctagatcaacacacacttaacagaccaaaaaaggataatcttcaggacaactgacctgtttttttcaccacatcagctgcaagaagaaaaataaaggagagggtgtttcgaactacctatcaaagaagacattttggggggtgccgggcgctgcggctcacacctgtaatcccagcactttgggaagccaaggcgggtagatcacctgaggtcaggagtttgggaccagcctggccaacatggcgaaaccccatctctactaaaaatacaaaaatcagctaggcatggtggtgtgcacctgtaatcccagctactcaggaggctgaggcaggagaatcgcttgaacctgggaggcggaggttgcagtgagccaagatcccgccactgcactccagcctgggtgacagagcgagactctgtctcaaaaaaaaaaaaaaaaaaaaggccgggtgaggtggctcacgcctgtaatcacagcactgtgggaggctgaggcgggcggatcacctgaggtcgggagttcaagaccagcctggccaacatggagaaaccctgtctctactaaaaaatacaaaattagccaggcgtggtggcgcatgcctgtaatccagctactcgggaggctgaggcaggagaatcgcttgaacccaggaggcggaggttgcggtgagccgagattgcgccactgcactctagcctgggcaaaaggagcaaaactccgtctcaaaaaaaaaaaaaaaaagacatttgggggatctggaaaatgtaaatggcctggatatgaggtaacactaagaaatgagttgatcatggaattgtattatgtaaagaattatgtccttattttgtcagggaaacatactgaacaacttagagatgagtgacactggctcatcagtccagggacagaagaggaactacagggtggcctcatagtttagggctgggcctgtggagggcatgatctcaaggtccctctggtgccaagctgctctgggagcagatgtggcctcacctcgctccccacttctcaatgtgggcaaagtccacccaggcccaagccctgcctcatgggcagggtgttcacagtttgggtaccaccaggagccccctttggccaatggaccaggccagcaaccccctcttggaggtgagcttccaggccccagcccagggtgcaggaagtggagctacacccattcacctctggccagggccactgtggggtcagttgcctcagccctggaaagctcagcttgtccccagggaacttggtcttggagagcagcctgccgtaaccgccccccgactacagctgcccccaaagctgtgaactcagagtatatgacaaatggccaagcacaagagtgtgaggccctcctatcctgcagaggctgctccagccacacctctgcagccaggaggcagtgacagcccagtgtcctcaaggtccccccatctcccaggatgcttcctgaaggctctggttaaactgcaccagtggctggtgagcaaaggctgcaggcccttttcacaaaacactctgaactggtccatgcagggcaccctccctgtcttcctcccaacctactgcctgaccgtccccccgccctgcctttgcccaggtcatcccttcagccaggaacaatcccgtccctcccagccacaccttcgacagggtctcagccccaacatttcttttttaaggatgcacaccctgcaaatcccaggacaggactacagctctttttggaatcccctttctcatgtctgggatcatttgatatccctcttcctcaccttacaagggtagtgactgtgtttttgtcaaaccctgtgtccccggcactcagcgcagcaccagacagggaggagctgtgtttggtttatgtttgttgaatgaatgaccacatcacatttgcttggagggcctggccaaggcccgtacttcagccctaaatgatatggtcagggccagtgactgcactgggggctctgaggaagcagaactccccaccccactcttttgcctcacccctgccctggggggcacttccctctccctggcccccaccaagtggcctcccactgggactcctcaggccttgctgcagtcagctggttacctgtccatgcctgctttgagagggacatgccccatgcccactgagggtaggacccacatctcatgcagtgccagtactcagtaaagggcaaacactgagggcctgtaaccctctggatagtgacaacatagaggcaggaagcaagggacttcaggaacccaaaggaaactgggaaaaccaaacctcctttctcaatggagaacctgctggtcgctgtcctcggggagctagactcttgtgcacacacaattcctcatcagaaacaggcaaagagggcactgggcctcccctgctgcagctgtgtccacagagaacagctaggccaccacacaaccccaagcctggccctgcctccagcctcctcctgtgccaaccaaggcctcaccatggctcaatccacatggcccccagaggcagcagtcctggttcaaattcaggatctgcccttgctagctgcatgggtgagttctttcacttctctgtccctgtttcctaatgtgtaacacaggaataagcagtggcctcttccttccagggtttgctgcaactgtgcctgaagctctgtgacaatgcaccccccatctctgcaaaagcaaacccccaaaggcctggtttctaaagcaacagcagtttcagcagcaccgtcagagaggcacttcaggccaatcctggaggagccaggagtgacccttagagtgggccccagggacgtcagccttcttggaaaacagctcaaggggtgagggggcctccctcctcctgcctcccccttctcccactcccaaagcagccaggtccctagggagggtcagagaacagatgctgggagtttccagtccccctaaccagagggggtcacaaggaagatgtgcagaatgaacatcctgggaaactgggaaatgactagggaggaacatggtgcctccccgccagcaaaaaaaattatacccttccccatgagatggagtgtcagcaagcttccaggccccagcccagggtgcaggaagaggagctacacccattcacctctggtcagcatgctcccaacgtctgagacctcatttctcattccttcttcagtccccattctcattgtggttcgaggtctttctctctgagccaggaactccgcaaccttccaccctccctacctcttcctctcctaccccagcctggggctcagtcctggctcaagcactcagtccagcagaagcactgtgtagcctcccattaaagctcacgcctgtgaaaagaacagccattgaggccttgagatggggccacactgacccgctgactctcaggactggacacagcagaggccacacatactcagaacaaagcctggaaaggcaaggctggaggtcagtagttgtggcagcttcacatcaactcagctttaatgtgatttaatttccttctccctccagtgggccaaaggtgcaaagataagtatggctgttctctctccttctaacagtgaggtgctgggggtgggggtgggggaatatggagaagggaccctcaccacccacaccttcctgcctccccaacaagtgctgccctcctctgcccagcattctccccactttgccctcagctagtgggtgcttagcctccagatagcatgccccacctaggccctgccctgggcctgtgatccagaggtcccaagaagcagaggccaggctggatccagggggtcagccaaggtgagggtgggagcacacaggattatctcccagggacagggctgctgcctcgtagctcaggatggatagaatgtggggggatatccagctacattttccctccacaaaagaccagaatgggagagggatggggtgctgccccgactttcttcaactccccggagcagaaaaatgccctacctccactttccagtgccaagattcaagaagaaaggcaagcggagacttccctttctcagtccctgcttactaatggaaacacgggtccagaacctaaatccagtccctcctccttcataccaccgggagggaggtgcagcccaagcccccgaggccccaagggtccaggtgtaggaccctttatcctctccggcagccatccctgtgggtgtggcacccccgccacaccccattcttgtcatctcagggggaggggggaaatgtaatcggacatcccccccatccaatccatcctgagctgcgaggcggcggctctgtccctcggagataatcctgtgcactccccaccttcactcacctcggctgacgcaggagtctccggagcccgcactcccagacatcactgccctccttcctgagggtgctgaggctcggaggctcagagatgctactggtccaaggtcatgcagcgaggcagcggcaatgaacagggtcgtggggaggagggggcgctgaccccattacgcccccgccctcactaccgcactcatgcccccggacaatcgcttcgcggaaaacaccccagctgcaccagctaacggtcactgcgccccgggaacctgacatcactctagttcaggtgctggggagtcctccaggcccggccccgacagcggagccccccaccccagccctgccatcacggccgctggggtcccaggcactgactgctcaggacagggccgggaccgggaggggacctcggcgaacgggaaggaaccgggaggcagggagcagaggggtggcctcaccttgcggggtgcaccccggggccggggagggcagggacgaccactgcagcggcggcggctgcaggagctcaacgccgagcacgaggaagggagccccgcgccgcggccgccctcccgtcggcacgcccccgcctccgcccattggttgatctgggagggtggggcgagggacgctccggaccaatgagcgggctccaaagaacggccaactggcgagggccgcctacgtcacgtgccagggtcgccgaggcagcgccctgctagtccgcgcctgccgggcgagctctcgcgaggaagacgggcaggcggcccaactaggccaggggccagaaccgaccactcgaagagggagaaggagggcctcggataggccccgcccccgctccttcttccgcctgggggatagcgcctctagccttgaaccttgcttaggacgcacctcccttgggcccttcgctctcgggagggctgtcgggcgcgtctcggggctgggtggagctcccgaaggtggcctttctccctgggcttccacgccggcttcggcca

SEQ ID NO: 709 - DNA, 1892 bp, Homo sapiens
ctacctccaaggcaataggatcaatgagttctccatcagcagcttctgcaccgtggtggacgtcgtgaacttctccaagctgcaggtgctgcgcctggacgggaacgagatcaagcgcagcgccatgcctgccgacgcgcccctctgcctgcgccttgccagcctcatcgagatctgagcagccctggcaccgggtactgggcggagagcccccgtggcatttggcttgatggtttggtttggcttttgctggaaggtccaggatggaccatgtgacagaagtccacgggcaccctctgtagtcttctttcctgtaggtggggttagggggggcgatcagggacaggcagccttctgctgaggacataggcagaagctcactcttttccagggacagaagtggtggtagatggaaggatccctggatgttccaaccccataaatctcacggctcttaagttcttcccaatgatctgaggtcatggaacttcaaaagtggcatgggcaatagtatataaccatacttttctaacaatccctggctgtctgtgagcagcacttgacagctctccctctgtgctgggctggtcgtgcagttactctgggctcccatttgttgcttctcaaaatatacctcttgcccagctgcctcttctgaaatccacttcacccactccactttcctccacagatgcctcttctgtgccttaagcagagtcaggagaccccaaggcatgtgagcatctgcccagcaacctgtggagacaacccacactgtgtctgagggtgaaaggacaccaggagtcacttctatacctccctaacctcacccctggaaagccaccagattggaggtcaccagcatgatgataatattcatgacctgatgtgggaggagacagccaacctcaggcttagatcaatgtatagggctatattttggcagctgggtagctctttgaaggtggataagacttcagaagaggaaaggccagactttgcttaccatcagcatctgcaatgggccaaacacacctcaaattggctgagttgagaaagcagccccagtagttccattcttgcccagcactttctgcattccaaacagcatcctacctgggtttttatccacaaaggtagcggccacatggtttttaaagtatgagaaacacagtttgtcctctccttttatccaagcaggaagattctatatcctgatggtagagacagactccaggcagccctggacttgctagcccaaagaaggaggatgtggttaatctgtttcacctggtttgtcctaaggccatagttaaaaagtaccagctctggctggggtccgtgaagcccaggccaggcagccaaatcttgcctgtgctgggcatacaaccctctgctttcacatctctgagctatatcctcattagtgaaggtggcttttgctttatagtttggctggggagcacttaattcttcccatttcaaaaggtaatgttgcctggggcttaacccacctgccctttgggcaaggttgggacaaagccatctgggcagtcaggggcaaggactgttggaggagagttagcccaagtataggctctgcccagatgccatcacatccctgatactgtgtatgctttgaagcaccttccctgagaagggaagaggggatctttggactacgttcttggctccagacctggaatccacaaaagccaaaccagctcatttcaacaaaggagctccgatgtgaggggcaaggctgccccctgccccagggctcttcagaaagcatctgcatgtgaacaccatcatgcctttataaaggatccttattacaggaaaagcatgagtggtggctaacctgaccaataaagttattttatgattgc

SEQ ID NO: 710 - DNA, 876 bp, Homo sapiens; identical to SEQ ID NO: 84

SEQ ID NO: 711 - DNA, 1340 bp, Homo sapiens
gcacccggcagcggtctcaggccaagccccctgccagcatggccagcgagttcaagaagaagctcttctggagggcagtggtggccgagttcctggccacgaccctctttgtcttcatcagcatcggttctgccctgggcttcaaatacccggtggggaacaaccagacggcggtccaggacaacgtgaaggtgtcgctggccttcgggctgagcatcgccacgctggcgcagagtgtgggccacatcagcggcgcccacctcaacccggctgtcacactggggctgctgctcagctgccagatcagcatcttccgtgccctcatgtacatcatcgcccagtgcgtgggggccatcgtcgccaccgccatcctctcaggcatcacctcctccctgactgggaactcgcttggccgcaatgacctggctgatggtgtgaactcgggccagggcctgggcatcgagatcatcgggaccctccagctggtgctatgcgtgctggctactaccgaccggaggcgccgtgaccttggtggctcagccccccttgccatcggcctctctgtagcccttggacacctcctggctattgactacactggctgtgggattaaccctgctcggtcctttggctccgcggtgatcacacacaacttcagcaaccactggattttctgggtggggccattcatcgggggagccctggctgtactcatctacgacttcatcctggccccacgcagcagtgacctcacagaccgcgtgaaggtgtggaccagcggccaggtggaggagtatgacctggatgccgacgacatcaactccagggtggagatgaagcccaaatagaaggggtctggcccgggcatccacgtagggggcaggggcaggggcgggcggagggaggggaggggtgaaatccatactgtagacactctgacaagctggccaaagtcacttccccaagatctgccagacctgcatggtcaagcctcttatgggggtgtttctatctctttctttctctttctgtttcctggcctcagagcttcctggggaccaagatttaccaattcacccactcccttgaagttgtggaggaggtgaaagaaagggacccacctgctagtcgcccctcagagcatgatgggaggtgtgccagaaagtcccccctcgccccaaagttgctcaccgactcacctgcgcaagtgcctgggattctaccgtaattgctttgtgcctttgggcacggccctccttcttttcctaacatgcaccttgctcccaatggtgcttggagggggaagagatcccaggaggtgcagtggagggggcaagctt

SEQ ID NO: 712 - DNA, 1066 bp, Homo sapiens
gtgggtgcgccgtgctgagctctggctgtcagtgtgttcgcccgcgtcccctccgcgctctccgcttgtggataactagctgctggttgatcgcactatgactctggaagaagtccgcggccaggacacagttccggaaagcacagccaggatgcagggtgccgggaaagcgctgcatgagttgctgctgtcggcgcagcgtcagggctgcctcactgccggcgtctacgagtcagccaaagtcttgaacgtggaccccgacaatgtgaccttctgtgtgctggctgcgggtgaggaggacgagggcgacatcgcgctgcagatccattttacgctgatccaggctttctgctgcgagaacgacatcgacatagtgcgcgtgggcgatgtgcagcggctggcggctatcgtgggcgccggcgaggaggcgggtgcgccgggcgacctgcactgcatcctcatttcgaaccccaacgaggacgcctggaaggatcccgccttggagaagctcagcctgttttgcgaggagagccgcagcgttaacgactgggtgcccagcatcaccctccccgagtgacagcccggcggggaccttggtctgatcgacgtggtgacgccccggggcgcctagagcgcggctggctctgtggaggggccctccgagggtgcccgagtgcggcgtggagactggcaggcggggggggcgcctggagagcgaggaggcgcggcctcccgaggaggggcccggtggcggcagggccaggctggtccgagctgaggactctgcaagtgtctggagcggctgctcgcccaggaaggcctaggctaggacgttggcctcagggccaggaaggacagactggccgggcaggcgtgactcagcagcctgcgctcggcaggaaggagcggcgccctggacttggtacagtttcaggagcgtgaaggacttaaccgactgccgctgctttttcaaaacggatccgggcaatgcttcgttttctaaaggatgctgctgttgaagctttgaattttacaataaactttttgaaacaaaaaaaaaaaaaaa

SEQ ID NO: 713 - DNA, 1008 bp, Homo sapiens
ggacctccgggcctccggggcgaccccggctttgagggagaacgaggcaagccggggctcccaggagagaagggagaagccggagatcctggaagacccggggacctcggacctgttgggtaccagggaatgaagggagaaaaagggagccgtggggagaagggctccaggggaccaaagggctacaagggagagaagggcaagcgtggcatcgacggggtggacggcgtgaagggggagatggggtacccaggcctgccaggctgcaagggctcgccgggttttgacggcattcaaggaccccctggccccaagggagaccccggcgcctttggactgaaaggagaaaagggcgagcctggagctgacggggaggccgggagaccaggagctcggggaccatctggagacgaggggccagccggagagcctgggccccccggagagaaaggagaggcgggcgacgaggggaacccaggacctgacggtgcccccggggagcggggtggccctggagagagaggaccacgggggaccccaggcccgcggggaccaagaggagaccctggtgaagctggcccgcagggtgatcagggaagagaagggcccgttggtgtccctggagacccgggcgaggctggccctatcggacctaaaggctaccgaggcgatgagggtcccccagggtccgagggtgccagaggagccccaggacctgccggaccccctggagacccggggctgatgggagaaaggggagaagacggccccgctggaaatggcaccgagggcttccccggcttccccgggtatcccgggaacaggggcgctcccgggataaacggcacgaagggctaccccggcctcaagggggacgagggagaagccggggaccccggagacgataacaacgacattgcaccccgaggagtcaaaggagcaaaggggtaccggggtcccgagggcccccagggacccccaggacaccaaggaccgcctgggccggac

SEQ ID NO: 714 - DNA, 3127 bp, Homo sapiens
gtagtgagccggctgagaggcatggagacgcaggaacttcggggggccctggctcttctcctcctttgctttttcacatctgccagtcaggatctgcaggtaattgacctgctgactgtgggcgagtctcggcagatggtagctgtggcagagaagatccggacagccttgctcactgctggggacatctacctcttatccaccttccgcctgccccccaagcagggtggtgtcctctttggcctctattctcgccaagacaacactcgatggctggaggcctctgttgtaggcaagatcaacaaagtactggtgcgataccagcgggaggatggcaaagtccacgccgtgaacctacagcaagcgggcctggctgatgggcgcacacacacagttctcctgcgactccgaggtccctccagacccagccctgccctacatctctacgtggactgcaaactgggtgaccaacatgcaggccttccagcactggcccccattcctccagcggaggtcgatgggctggagattaggactggacagaaggcgtatttgaggatgcagggctttgtggaatctatgaaaattattctgggtgggtccatggcccgggtaggagccctgagtgagtgtccattccaaggggacgagtccatccacagtgcagtgaccaatgcactgcactccattctaggggagcagaccaaggcgctggtcacccaactcaccctcttcaaccagatcctggtggagctgcgggatgatatacgagaccaggtaaaggaaatgtccctgatccgaaacaccattatggagtgtcaggtgtgcggcttccatgagcagcgttcccactgcagccccaatccctgcttccgaggtgtggactgcatggaagtgtacgagtacccaggctaccgctgtgggccctgcccccctggcctgcagggcaacggcacccactgcagtgacatcaatgagtgtgctcacgctgacccctgtttcccgggctccagctgcatcaacaccatgcccggcttccactgtgaggcctgtcctcgagggtacaagggcacacaggtgtctggtgtgggcattgactatgcccgggccagcaaacaggtctgcaatgacatcgatgaatgcaacgatggcaacaatggtggctgtgacccaaactccatctgcaccaacactgtgggctctttcaagtgtggtccctgccgcctgggtttcctgggcaaccagagccagggctgcctcccagcccggacctgccacagcccagcccacagcccctgccacatccatgctcactgtctctttgaacgcaatggtgcagtgtcctgccagtgtaacgtgggctgggctgggaatgggaacgtgtgtgggactgacacagacatcgatggctacccagaccaagcactgccctgcatggacaacaacaaacactgcaaacaggacaactgccttttgacacccaactctgggcaggaagatgctgataatgatggtgtgggggaccagtgtgatgatgatgctgatggggatgggatcaagaatgttgaggacaactgccggctgttccccaacaaagaccagcagaactcagatacagattcatttggtgatgcctgtgacaattgccccaacgttcccaacaatgaccagaaggacacagatggcaatggggaaggagatgcctgtgacaacgacgtggatggggatggcatccccaatggattggacaattgccctaaagtccccaacccactacagacagacagggatgaggacggggtgggagatgcttgcgacagctgccctgaaatgagcaatcctacccagacagatgcagacagcgacctggtgggggatgtctgtgatactaatgaagacagcgatggggatgggcatcaggacaccaaggacaactgcccacagctgccaaatagctcccagctggactctgataacgatggacttggagatgagtgtgatggggatgatgacaatgatggcatcccagattatgtgcctcctggtcccgataactgccgcctggtacccaatcccaatcagaaggactcagatggcaatggcgttggtgatgtgtgtgaggatgactttgacaatgatgctgtggtcgaccccctggatgtgtgtcctgaaagtgcagaggtaacgcttacggattttcgggcctatcagaccgtcgtcctggatcctgagggtgatgctcagattgacccaaactgggttgtgctcaaccagggcatggaaatcgttcagaccatgaacagtgaccctggcttggcagttggatacacggccttcaatggtgtggactttgaaggcaccttccatgtgaacacagtgactgatgatgactacgcaggctttctcttcagttatcaagacagtggccgcttctacgtagtcatgtggaagcagaccgagcagacctactggcaggctacacccttccgggcggttgcccagcccgggctgcagctcaaggcagtgacatcagtgtctggcccaggtgagcacctccgaaatgccctgtggcatactggccacacccctgatcaggtacgactcctgtggacagacccacgaaatgtgggctggcgggacaagacctcctatcgctggcagcttctgcaccggcctcaagttggctacattcgggtgaagctctatgagggaccccagcttgtggcggattctggggtgatcattgacacatccatgcgaggggggcgtcttggtgtattctgcttctcccaagaaaacataatttggtccaatctccagtatcgatgcaatgacacagtgcctgaggactttgagccattccggaggcagctgctccagggaagggtgtgaggaggaggccaccagattcagaattcagaattttagaccctttggccttggggtccatcctggagaccctgaggtctaagctacagcccctcagccaaccacagacccttctctggctcccaaaaggagttcagtcccagaggggtggtcaccccacccttcaggggatgagaagttttcaaggggtattactcaggcactaaccccaggttagatgacagcacattgccataaa

SEQ ID NO: 715 - DNA, 2479 bp, Homo sapiens; identical to SEQ ID NO: 91
  misc_feature 1146: n = A,T,C or G

SEQ ID NO: 716 - DNA, 2110 bp, Homo sapiens; identical to SEQ ID NO: 92

SEQ ID NO: 717 - DNA, 1755 bp, Homo sapiens; identical to SEQ ID NO: 93

SEQ ID NO: 718 - DNA, 1791 bp, Homo sapiens; identical to SEQ ID NO: 94

SEQ ID NO: 719 - DNA, 1141 bp, Homo sapiens
gatcctggagaaaccacctccttgcttaggcccaagcaggttcctggcaggctcaggaccaaattccaggggccactcatgggcctagcagcccaaggccgcctccccctcgtctttcttccatctctctttcctcgtcctggcgagatgccagccagcacctcagtgtccccatctgggcagtggaaagtttgactctctgggtccttgtttgagtgagtgcgagtgtgtccgttcctttgctgtctgccccaggcgggggagggggggggaggtggtgggggcgagggggcgggggctcagctagtccagccgtctacaagaaaattgctccctttgaagctgccaggggggccgggaagcctgccccctcctgctcgcccgccctctccgccccaccagccccctccctcctttcctccctccccgccctctccccgctgtcccctccccgtcggcccgcctgcccagcctttagcctcccgcccgccgcctctgtctccctctctccacaaactgcccaggagtgagtagctgctttcggtccgccggacacaccggacagatagacgtgcggacggcccaccaccccagcccgccaactagtcagcctgcgcctggcgcctcccctctccaggtagggctggcttcaagctgcctcctcagcaacccagagatgcccctggctctgctgcctccgctgtcccaagccctggtcctgctgtccccagtgccgcgagggtgtccacagatttccccggtgctctctgtaggctgctgatccacgccccttcatcgccaccctgcggcccccttggtccctgtcaggcttctgctcgtctcgccgccctccaggcacctttccctcaccccttcctctcccttctgaccttgctctgcttcatccacctcttgtctctctgcctcccactcggggtccgtcttcttggctaccaccctagagcgtggctgggtgactggtaccccagctttgccaatggccctgtttcatcattgcaagtcccaggcgcatgctccactccctcagcctcgctctgcccaggcgcctccttgctccaggcttggcgcctggcccgggttgggtcggatcggggaggaccgcccagcgcccaccgagctc

SEQ ID NO: 720 - DNA, 614 bp, Homo sapiens
tttttttttttttttttttgaattttaatatgatattttattatgggtgtctgtaaggaaaaaaaagatcaacaaccacatacaagcttacaaagttaaatttcaacacattctctatgctagtgtgacaaaagcagccccataatttggtttttattgttgacctttacaggatgaaggaggagaatcccctgtggcatgccaatgaatctttctgatgggagacatgtacagattttgtgcatttatgttctgaatgcaagtcaacaattctgatctagagtttaaaagtgaaagtacattagcaccataacatgcgtctttaaagccttcccaaatattagtaatcttgaccagcaatgacaagaaaaaagaggagcacctttacaagcagttgatatccaatattaaaataattgtggctttaaaaatatttctttaaattcttgcattacacttttctttttaaaccaatcttccaggagattaatcaatgaaatttataagttttatcaacgtataaaatttttttcatcttctgggactcatagaatacaatctgtgtttctgaccagttgaggtagttaaaatagggagggcttttctaatttcgt

SEQ ID NO: 721 - DNA, 2386 bp, Homo sapiens; identical to SEQ ID NO: 97

SEQ ID NO: 722 - DNA, 3900 bp, Homo sapiens
gcgagcggcggcacgacgaggggaaaagagctgagcgagaccaaagtcagccgggagacagtgggtctgtgagagaccgaatagaggggctggggccacgagcgccattgacaagcaatggggaagaaacagaaaaacaagagcgaagacagcaccaaggatgacattgatcttgatgccttggctgcagaaatagaaggagctggtgctgccaaagaacaggagcctcaaaagtcaaaagggaaaaagaaaaaagagaaaaaaaagcaggactttgatgaagatgatatcctgaaagaactggaagaattgtctttggaagctcaaggcatcaaagctgacagagaaactgttgcagtgaagccaacagaaaacaatgaagaggaattcacctcaaaagataaaaaaaagaaaggacagaagggcaaaaaacagagttttgatgataatgatagcgaagaattggaagataaagattcaaaatcaaaaaagactgcaaaaccgaaagtggaaatgtactctgggagtgatgatgatgatgattttaacaaacttcctaaaaaagctaaagggaaagctcaaaaatcaaataagaagtgggatgggtcagaggaggatgaggataacagtaaaaaaattaaagagcgttcaagaatgaattcttctggtgaaagtggtgatgaatcagatgaatttttgcaatctagaaaaggacagaaaaaaaatcagaaaaacaagccaggtcctaacatagaaagtgggaatgaagatgatgacgcctccttcaaaattaagacagtggcccaaaagaaggcagaaaagaaggagcgcgagagaaaaaagcgagatgaagaaaaagcgaaactgcggaagctgaaagaaagagaagagttagaaacaggtaaaaaggatcagagtaaacaaaaggaatctcaaaggaaatttgaagaagaaactgtaaaatccaaagtgactgttgatactggagtaattcctgcctctgaagagaaagcagagactcccacagctgcagaagatgacaatgaaggagacaaaaagaagaaagataagaagaaaaagaaaggagaaaaggaagaaaaagagaaagagaagaaaaaaggacctagcaaagccactgttaaagctatgcaagaagctctggctaagcttaaagaggaagaagaaagacagaagagagaagaggaagaacgtataaaacggcttgaagaattagaagccaagcgtaaagaagaggaacgattggaacaagaaaaaagagaaaggaaaaagcaaaaagaaaaagaaagaaaagaacgcttgaaaaaagaagggaaacttttaactaaatcccagagagaagccagagccagagccgaagctactcttaaactgctacaagctcagggtgttgaagtgccatcaaaagactctttgccaaagaagaggccaatttatgaagataaaaagaggaaaaaaataccacagcagctagaaagtaaagaagtgtctgaatcaatggaattatgtgctgctgtagaagttatggaacaaggagtaccagaaaaggaagagacaccacctcctgttgaaccagaagaagaagaagatactgaggatgctggattggatgattgggaagctatggccagtgatgaggagacagaaaaagtagaaggaaacacagttcatatagaagtaaaagaaaaccctgaagaggaggaggaggaggaagaagaggaagaagaagatgaagaaagtgaagtagaggaggaagaggagggagaaagtgaaggcagtgaaggtgatgaggaagatgaaaaggtgtcagatgagaaggattcagggaagacattagataaaaagccaagtaaagaaatgagctcagattctgaatatgactctgatgatgatcggactaaagaagaaagggcttatgacaaagcaaaacggaggattgagaaacggcgacttgaacatagtaaaaatgtaaacaccgaaaagctaagagcccctattatctgcgtacttgggcatgtggacacagggaagacaaaaattctagataagctccgtcacacacatgtacaagacggtgaagcaggtggtatcacacaacaaatttgggccaccaatgttcctcttgaagctattaatgaacagactaagatgattaaaaattttgatagagagaatgtacggattccaggaatgctaattattgatactcctgggcatgaatctttcagtaatctgagaaatagaggaagctctctttgtgacattgccattttagttgttgatattatgcatggtttggagccccagacaattgagtctatcaaccttctcaaatctaaaaaatgtcccttcattgttgcactcaataagattgataggttatatgattggaaaaagagtcctgactctgatgtggctgctactttaaagaagcagaaaaagaatacaaaagatgaatttgaggagcgagcaaaggctattattgtagaatttgcacagcagggtttgaatgctgctttgttttatgagaataaagatccccgcacttttgtgtctttggtacctacctctgcacatactggtgatggcatgggaagtctgatctaccttcttgtagagttaactcagaccatgttgagcaagagacttgcacactgtgaagagctgagagcacaggtgatggaggttaaagctctcccggggatgggcaccactatagatgtcattttgatcaatgggcgtttgaaggaaggagatacaatcattgttcctggagtagaagggcccattgtaactcagattcgaggcctcctgttacctcctcctatgaaggaattacgagtgaagaaccagtatgaaaagcataaagaagtagaagcagctcagggggtaaagattcttggaaaagacctggagaaaacattggctggtttacccctccttgtggcttataaagaagatgaaatccctgttcttaaagatgaattgatccatgagttaaagcagacactaaatgctatcaaattagaagaaaaaggagtctatgtccaggcatctacactgggttctttggaagctctactggaatttctgaaaacatcagaagtgccctatgcaggaattaacattggcccagtgcataaaaaagatgttatgaaggcttcagtgatgttggaacatgaccctcagtatgcagtaattttggccttcgatgtgagaattgaacgagatgcacaagaaatggctgatagtttaggagttagaatttttagtgcagaaattatttatcatttatttgatgcctttacaaaatatagacaagactacaagaaacagaaacaagaagaatttaagcacatagcagtatttccctgcaagataaaaatcctccctcagtacatttttaattctcgagatccgatagtgatgggggtgacggtggaagcaggtcaggtgaaacaggggacacccatgtgtgtcccaagcaaaaattttgttgacatcggaatagtaacaagtattgaaataaaccataaacaagtggatgttgcaaaaaaaggacaagaagtttgtgtaaaaatagaacctatccctggtgagtcacccaaaatgtttggaagacattttgaagctacagatattcttgttagtaagatcagccggcagtccattgatgcactcaaagactggttcagagatgaaatgcagaagagtgactggcagcttattgtggagctgaagaaagtatttgaaatcatctaattttttcacatggagcaggaactggagtaaatgcaatactgtgttgtaatatcccaacaaaaatcagacaaaaaatggaacagacgtatttggacactgatggacttaagtatggaagga

SEQ ID NO: 723 - DNA, 1369 bp, Homo sapiens; identical to SEQ ID NO: 104

SEQ ID NO: 724 - DNA, 1500 bp, Homo sapiens
ggggtcggccgggtgctaggccggggccgaggccgaggccggggcgggatccagagcgggagccggcgcgggatctgggactcggagcgggatccggagcgggacccaggagccggcgcggggccatggcgaggcgcgggccagggtggcggccgcttctgctgctcgtgctgctggcgggcgcggcgcagggcggcctctacttccgccggggacagacctgctaccggcctctgcggggggacgggctggctccgctggggcgcagcacatacccccggcctcatgagtacctgtccccagcggatctgcccaagagctgggactggcgcaatgtggatggtgtcaactatgccagcatcacccggaaccagcacatcccccaatactgcggctcctgctgggcccacgccagcaccagcgctatggcggatcggatcaacatcaagaggaagggagcgtggccctccaccctcctgtccgtgcagaacgtcatcgactgcggtaacgctggctcctgtgaagggggtaatgacctgtccgtgtgggactacgcccaccagcacggcatccctgacgagacctgcaacaactaccaggccaaggaccaggagtgtgacaagtttaaccaatgtgggacatgcaatgaattcaaagagtgccacgccatccggaactacaccctctggagagtgggagactacggctccctctctgggagggagaagatgatggcagaaatctacgcaaatggtcccatcagctgtggaataatggcaacagaaagactggctaactacaccggaggcatctatgccgaataccaggacaccacatatataaaccatgtcgtttccgtggctgggtggggcatcagtgatgggactgagtactggattgtccggaattcatggggtgaaccatggggcgagagaggctggctgaggatcgtgaccagcacctataaggatgggaagggcgccagatacaaccttgccatcgaggagcactgtacatttggggaccccatcgtttaaggccatgtcactagaagcgcagtttaagaaaaggcatggtgacccatgaccagaggggatcctatggttatgtgtgccaggctggctggcaggaactggggtggctatcaatattggatggcgaggacagcgtggtactggctgcgagtgttcctgagagttgaaagtgggatgacttatgacacttgcacagcatggctctgcctcacaatgatgcagtcagccacctggtgaagaagtgacctgcaacacaggaaacgatgggacctcagtcttcttcagcagaggacttgatattttgtatttggcaactgtgggcaataatatggcatttaagaggtgaaagagttcagacttatcaccattcttatgtcactttagaatcaagggtgggggagggagggagggagttggcagtttcaaatcgcccaactgataaataaagtatctggctctgcacgag

SEQ ID NO: 725 - DNA, 1594 bp, Homo sapiens; identical to SEQ ID NO: 106

SEQ ID NO: 726 - DNA, 2487 bp, Homo sapiens; identical to SEQ ID NO: 108

SEQ ID NO: 727 - DNA, 1015 bp, Homo sapiens; identical to SEQ ID NO: 109

SEQ ID NO: 728 - DNA, 2852 bp, Homo sapiens; identical to SEQ ID NO: 110

SEQ ID NO: 729 - DNA, 5676 bp, Homo sapiens
gtccccatgacctcctaaagtggtgcggtccctgctgagtgcgctgcccgggccgtgacccgcgcccctgtgcgtccccgcgcgcctccgagcgcccctgtgcgccccggcccgcgccccgccggcatggacgtccatacccgctggaaagcgcgcagcgcgctccgcccgggcgccccgctgctgcccccgctgctgctgctgctgctgtgggcgccgcctccgagccgcgcagctcagccagcagatctcctgaaggttctagattttcacaacttgcctgatggaataacaaagacaacaggcttttgcgccacgcggcgatcttccaaaggcccggatgtcgcttacagagtcaccaaagacgcgcagctcagcgcacccaccaagcagctgtaccctgcgtctgcatttcccgaggacttctccatcctaacaactgtgaaagccaagaaaggcagccaggccttcctggtctccatctacaacgagcagggtatccagcagattgggctggagctgggccgctctcccgtcttcctctacgaggaccacacggggaagcctggcccggaagactaccccctcttccggggcatcaacctgtcagatggcaagtggcacagaattgctctcagcgtccacaagaaaaatgtcaccttgatcctcgactgtaaaaagaagaccaccaaattcctcgaccgcagcgaccaccccatgatcgacatcaatggcatcatcgtgtttggcacccggatcctggatgaggaggtgtttgagggtgacatccagcagctgctctttgtctcggaccaccgggcagcttatgattactgtgagcactacagccctgactgtgacaccgcagtacctgacaccccacagtcgcaggaccccaatccagatgaatattacacggaaggagacggcgagggtgagacctattactacgaatacccctactacgaagaccccgaagacctagggaaggagcccacccccagcaagaagcccgtggaagctgccaaagaaaccacagaggtccccgaggagctgaccccgacccccacggaagctgctcccatgcctgaaaccagtgaaggggctgggaaggaagaggacgtcggcatcggggactatgactacgtgcccagtgaggactactacacgccctcaccgtatgatgacctcacctatggcgagggggaggagaaccctgaccagcccacagacccaggcgctggggccgaaattcccaccagcaccgccgacacctccaactcctccaatccagctccgcctccaggggaaggtgcggatgacttggagggggagttcactgaggaaacgatccggaaccttgacgagaactactacgacccctactacgaccccaccagctccccgtcggagatcgggccgggaatgccggcgaaccaggataccatctatgaagggattggaggacctcggggcgagaaaggccaaaagggagaaccagcgattatcgagccgggcatgctcatcgagggcccgcctggcccagaaggccccgcgggtcttcccggacctccaggaaccatgggtcccactggccaagtcggggaccctggagaaaggggcccccctggacgcccaggccttcctggggccgatggcctgcccggtcctccaggaaccatgctcatgctgcccttccggtttggaggtggcggcgatgcgggctccaaaggccccatggtctcagcccaggagtcccaggcgcaagccattctccagcaggccaggttggcactgaggggaccagctggcccgatgggtctcacagggagacctggccctgtgggtccccctgggagcggaggtttgaagggcgagccgggagacgtggggcctcagggtcctcgaggtgtgcaaggcccgcctggtccggccgggaagcccggaagacggggtcgggctgggagtgatggagccagaggaatgcctggacaaactggccccaagggtgaccggggtttcgacggcctggctgggttgccaggcgagaagggccacaggggtgaccctggtccttccggcccaccaggacctccgggagacgatggagaaaggggtgacgacggagaagttgggcccagggggctgcctgggaagcccgggccacgtggtctgcttgggccgaaagggcccccaggtcctcccggacctcccggtgtcacgggtatggacggccagccggggccaaaaggaaatgtgggtccccagggagagcctggccccccaggacagcagggtaatccaggcgcccagggtcttccaggcccccagggtgcaattggtcctccaggagaaaagggtcccttggggaaaccaggccttccaggaatgcccggtgctgacggacccccgggacaccctggcaaagaaggccctccaggagagaaaggaggtcagggtccacctggcccccagggtccgattggctacccaggtcctcgaggagtcaagggggccgatggcatccgtggtctgaagggcacaaagggcgagaagggtgaagacggctttcctgggtttaaaggagacatgggcatcaagggtgatcggggggagatcggcccacccggtcccaggggagaagatggccctgaaggcccaaagggtcgcggaggtcccaatggtgaccccggtcctctgggaccccctggggagaagggaaaactcggagtcccagggttaccagggtatccaggaagacaaggaccaaagggctctattggattccctggatttcctggcgccaatggagagaagggcggcagggggacccctggaaagccaggaccgcgggggcagcgaggcccaacgggtccgaggggtgaaagaggcccccggggcatcactgggaagcctggccccaagggcaactccggaggtgacggcccagctggccctcctggtgaacggggacccaatggaccccaaggacccacaggatttcctggaccaaagggcccccctggccctccaggcaaggatggactcccaggacaccctggacagagaggcgagactggtttccaaggcaagaccggccctccaggcccccccggcgtggtcggccctcagggtcccacgggagaaacgggcccaatgggtgagcgtggccaccctgggccccctggaccccccggtgaacaggggcttccgggccttgctggaaaagaagggacgaagggtgacccaggccctgcaggcctccctgggaaagatggccctccaggattacgtggtttccctggggaccgagggcttcctggtccagtgggagctcttggactgaaaggcaatgaagggccccctggcccaccaggccctgcgggatctccaggggagagaggtccagctggagccgctgggcccatcggaattccagggagacctgggccccagggacccccagggccggcaggagagaaaggggctcctggcgagaaaggcccacaaggcccagctggccgagacggtctccaggggcctgtggggctcccgggtccagctggccctgtgggtccccctggagaagacggagataagggagagatcggggagccggggcagaaaggaagcaagggggacaaaggagaacagggtcctcctgggcctacaggtcctcaaggccccatcggacagccaggcccctctggagctgacggcgagccggggcctcggggccagcagggccttttcgggcagaaaggtgatgaaggtcccagaggctttcctggaccccctgggccagtggggctgcagggtttgccaggacctccaggcgagaagggtgagacaggagacgtgggccagatgggccccccgggtccccctggcccccgaggaccctccggagctccaggtgctgatggcccacaaggtcccccaggtggaataggaaaccctggtgcagtgggagagaagggcgagcctggcgaagcaggtgagcctggcccttccgggagaagcggccccccgggacccaaaggagaaaggggagagaagggcgagtcaggcccttcaggtgctgccggaccccctggacccaaaggccctcccggagatgatggtcccaaaggcagccctggcccagtgggttttcctggagatcctggcccccccggagagcctggccccgcgggtcaagatggtccccctggtgacaaaggagatgatggtgaacccgggcagacgggatcccccggccctactggtgaaccaggtccatcggggcctccaggaaaaaggggtcccccaggccccgcaggccccgaaggcagacagggagagaaaggggccaagggagaagccggcttggaaggccctcctgggaagactggccccatcggcccccagggggcccctgggaagcccggaccggatggccttcgagggatccctggccctgtgggagaacaaggtctcccaggatccccaggcccggacggtccccccggccccatgggtcccccaggacttcccggcctcaaaggagattctggtcccaaaggtgaaaagggtcatccaggcctgatcgggctcatcggtcctccgggtgaacagggtgagaagggcgaccgtggtctccctggcccccagggctcctccggtcctaagggagaacagggtatcactggtccttctggcccgattgggcctcctgggccccctggcctgccgggtccgcctggtccaaaaggtgctaagggctcctcgggtccaactggcccgaggggtgaggcaggccacccaggacccccaggccccccgggccccccgggagaggtcatccagcccctgccaatccaggcatccaggacgcggcggaacatcgacgccagccagctgctggacgacgggaatggcgagaactacgtggactacgcggacggcatggaagagatcttcggctctctcaactctctgaagctggagattgagcagatgaaacggcccctgggcacgcagcagaaccccgcccgcacctgcaaggacctgcagctctgccaccccgacttcccagatggtgaatactgggtcgatcctaaccaaggatgctccagggattccttcaaggtttactgcaacttcacagccggggggtcgacatgcgtcttccctgacaagaagtccgaaggggccagaatcacttcttggcccaaagaaaacccgggctcctggttcagtgaattcaagcgtgggaaactgctctcctatgtggacgccgagggcaaccctgtgggtgtggtacagatgaccttcctgcggctgctgagcgcctctgcccaccagaacgtcacctaccactgctaccagtcagtggcctggcaggacgcagccacgggcagctacgacaaggccctccgcttcctgggctccaacgacgaggagatgtcctatgacaacaacccctacatccgcgccctggtggacggctgtgctaccaagaaaggctaccagaagacggttctggagatcgacacccccaaagtggagcaggtgcccatcgtggacatcatgttcaatgacttcggtgaagcgtcacagaaatttggatttgaagtggggccggcttgcttcatgggctaggagccgccgagcccgggctcccgagccgaattc

SEQ ID NO: 730 - DNA, 1732 bp, Homo sapiens
tctagaacactgcatctagtgtcgcaaacttgtcctcttgccccctctgccctggcaccttccctccccacaccagtaagtctgagaaggtccctgtgtcttctacttttccttttccagcatatggagacaaaagtgattatatcccggatgctaatccgccatgttgacctttaataaccccagtcccatgaatacctcctgattcctaggattttttttttaaactgtccttagcataagaacatgtcaaccttgatgctattgcccacattgtaggctatgaagcatacggcattctcacctgttccggaggctgcctttaattgtcttgcacagagcagtatactctttccttacggtatataaggccagggtctggggagtaacagtgcagaaatttatctgcttgccgccgcccaaggccacgcttctgtctaccacatcctccaatagcacccctattacctacagactggatttgtctgtctcgttctttggtttcttgactccttcgcgtttgggggctgctttgcatataaagccctttcacagaacacagcaccatgctagtacaatacgctgtagattctccctccctccccctctctctcatatactcatatatcttatgttgaaccaatatgaggcattgctcaaatttaagtcatattaaagttctaggctagttttgaaaacagaaactgattggaagcagaggttttcaaatagcccacatacgctactagaaggctgtacatttaagagagggccatctaggaagcaataataggcattaaaacaacaataaaacaacaaaacaaaacagaaacaaaaacaacttgggaaacggccctcctttcacgttttttctatcccatcgacaaaggcgcgctgtccttagctgcgatgattttgtctcgcctccaaaaagacgcccacgcactatgttgagcacccaagtgaggctacggttcctgcggtcacagagggcagggaggctcaagcacctccaaaaccccgagccctggacagctccccaggcccttcccgcggcgcgaggacaagaggtctccggggccctcgggggagcggcgcctcctcctggttccagcagctctgcgccgctccccacccaggcccgcgagaccagcgggacagtccgcgccgggagaccaactgggacgagccgcgacccacgcaggcgcgctgaggccggggcaggggcgggcccggctggcgcggccggctgcggttggggctggcgggggtgggacgggccaagccgggcagggccggggtggggcgctggcgtttccgttgcttggatcagtctaggtgcagctgcggatccttcagcgtctgcatctcggcgtcgccccgcgtaccgtcgcccggctctccgccgctctcccgggggttcggggcacttgggtcccacagtctgggtgagtggtcgcagcccggggagggggctccttctggagaggagagcgtggtcgcggggcactggattcgcgcggacgctcggccgagagctgtcccggtagctgcgagagggcgggtcggcccgtggcggcgtccgggctgtctgagcgcgccggtccccgcggacctgcgcttggggagggcacgagttgcaaatggcgcgctaagcccgaggtttcttctcttttgcagtcctgcttcaccttcccctgacctgagtagtcgccatggcacaggtaaggcc

SEQ ID NO: 731 - DNA, 4350 bp, Homo sapiens; identical to SEQ ID NO: 113

SEQ ID NO: 732 - DNA, 1348 bp, Homo sapiens; identical to SEQ ID NO: 114

SEQ ID NO: 733 - DNA, 2194 bp, Homo sapiens
gaattccgttttttttttttgacgtgacatctctttattggttcagtctatgcctggcccagcggcacgcccaggtccagggggggtctggttggaggtctctggacagtcaggggcagcatcagcagaaaccctgggtgtcggggggctgtgggagtagcagcactggtccccgcgttgacaggtgccctccttaaacctcttgcaaggaaatgtcttgagccgggcagcccgctggcaacatcttccggcggctccttccgcttgttctgaagcagcctgcgtctctcctccatagcttcgtcggccgccttgcccctgtgcgaggggaggagtaggtgggaccccatctgccctttaccccttctttccctggctgagccccacccccaccttaccaccactcaccctggccgggcacgaggccggggaccccagttggcctccgggttagcctggaagcgcttgagtcctcgctgtcgggagctggggttggcatcttcccggatggtgaagttggcctgcagcctgggctccacactgagaatgcggaacgctgggctagtctctgatagtcgctcccgtttcaccggacattccttctcccagcaacgcatgatgtcccagagggcagaggcaggggcatccgtcttcacagcgttcttacaggcgtgggagagtgagacccggaagtcagcgtggaggagggccgaccgcaactgcaggaggcttggtgtgttgcagtggatggtgctgctcagctggtgtgcgttctgccgaagcttgtggttgcacgcccatcgtcttaggggctaccttccgtgaccatgtccaagtctctgaagaagttggtggaggagagccgggagaagaaccagcccgaggtggacatgagtgaccggggcatctccaacatgctggatgtcaacggcctctttaccttatcccatatcacacaactggtcctcagccataacaagctaacaatggtgccaccgaacatcgcagaactgaagaatttggaggtgctcaacttttttaataaccaaatcgaggagctgcccacacagatcagtagccttcagaaactcaaacacctgaaccttggcatgaacaggctgaacactttgccacgaggcttcggctccctgccagctcttgaggttctggacttgacgtacaacaacttgagcgaaaattctcttcctggaaacttcttctacctgaccaccctgcgtgcactctatctaagtgacaacgattttgaaatcctgccgccagatattgggaagctcacaaagttgcagatactcagccttagggataacgacctgatctcgctgcctaaggaaatcggggagcttacccagcttaaagagctccacattcaggggaaccgcctcaccgttctgcccccagaactaggaaacttggatttaactggccagaagcaggtattcaaagcagagaacaatccctgggtgacccccattgcagaccagttccagcttggcgtgtcccatgtttttgagtatatccgttctgagacatacaaatacctctacggcagacacatgcaggccaacccagaaccaccgaagaagaataatgacaaatcgaaaaagatcagccggaaacccctggcagccaagaacagataaggaagggattggcatcggctggccttccagcaccttctctctccaacacttcattctctcttgccctgtctctcaaataaacccaatgctgcgtgtgaggccttttttatttttcttttcactctctttctaatgcttcccaccttaccttttagattcttttgctaggtgggagattgttataaggtctttaaaccatttccatttgtttctttaacattaccaaaagcagggaacaaagctcttattcaactgcgaattccatagtgggctctggcttttcttgaatagatatcacaaggttgcttattatcaaaagaataattaaaatcatgtaaccatttaaatgtcactgttaacacttttcactctttctgttgattcacctaactcattattttgctttattaaaagtcttccttcaccaccgagatatgctaatttaacttacaaatgattttaataaaatcttgagtttgtatcacatgttacttattgactcagaataaaagaacagtctgatcttggggtat

SEQ ID NO: 734 - DNA, 2131 bp, Homo sapiens; identical to SEQ ID NO: 116

SEQ ID NO: 735 - DNA, 3316 bp, Homo sapiens
gtgagcggcggccacggcatcctgtgctgtgggggctacgaggaaagatctaattatcatggacctgcgacagtttcttatgtgcctgtccctgtgcacagcctttgccttgagcaaacccacagaaaagaaggaccgtgtacatcatgagcctcagctcagtgacaaggttcacaatgatgctcagagttttgattatgaccatgatgccttcttgggtgctgaagaagcaaagacctttgatcagctgacaccagaagagagcaaggaaaggcttggaaagattgtaagtaaaatagatggcgacaaggacgggtttgtcactgtggatgagctcaaagactggattaaatttgcacaaaagcgctggatttacgaggatgtagagcgacagtggaaggggcatgacctcaatgaggacggcctcgtttcctgggaggagtataaaaatgccacctacggctacgttttagatgatccagatcctgatgatggatttaactataaacagatgatggttagagatgagcggaggtttaaaatggcagacaaggatggagacctcattgccaccaaggaggagttcacagctttcctgcaccctgaggagtatgactacatgaaagatatagtagtacaggaaacaatggaagatatagataagaatgctgatggtttcattgatctagaagagtatattggtgacatgtacagccatgatgggaatactgatgagccagaatgggtaaagacagagcgagagcagtttgttgagtttcgggataagaaccgtgatgggaagatggacaaggaagagaccaaagactggatccttccctcagactatgatcatgcagaggcagaagccaggcacctggtctatgaatcagaccaaaacaaggatggcaagcttaccaaggaggagatcgttgacaagtatgacttatttgttggcagccaggccacagattttggggaggccttagtacggcatgatgagttctgagctgcggaggaaccctcatttcctcaaaagtaatttatttttacagcttctggtttcacatgaaattgtttgcgctactgagactgttactacaaactttttaagacatgaaaaggcgtaatgaaaaccatcccgtccccattcctcctcctctctgagggactggagggaagccgtgcttctgaggaacaactctaattagtacacttgtgtttgtagatttacactttgtattatgtattaacatggcgtgtttatttttgtatttttctctggttgggagtatgatatgaaggatcaagatcctccactcacacatgtagacaaacattagctctttactctttctcaaccccttatatgattttaataattctcacttcactaattttgtaagcctgagatcaataagaaatgttcaggagagaggaaagaaaaaatatatatgctccacaatttatatttagagagagaacacttagtcttgcctgtcaaaaagtccaacatttcataggtagtaggggccacatattacattcagttgctataggtccagcaactgaacctgccattacctgggcaaggaaagatccctttgctctaggaaagcttggcccaaattgattttcttctttttccccctgtaggactgactgttggctaattttgtcaagcacagctgtggtgggaagagttagggccagtgtcttgaaaatcaatcaagtagtgaatgtgatctctttgcagagctatagatagaaacagctggaaaactaaaggaaaaatacaaatgttttcggggcatacattttttttctgggtgtgcatctgttgaaatgctcaagacttaattatttgccttttgaaatcactgtaaatgcccccatccggttcctcttcttcccaggtgtgccaaggaattaatcttggtttcactacaattaaaattcactcctttccaatcatgtcattgaaagtgcctttaacgaaagaaatggtcactgaatgggaattctcttaagaaaccctgagattaaaaaaagactatttggataacttataggaaagcctagaacctcccagtagagtggggatttttttcttcttccctttctcttttggacaatagttaaattagcagtattagttatgagtttggttgcagtgttcttatcttgtgggctgatttccaaaaaccacatgctgctgaatttaccagggatcctcatacctcacaatgcaaaccacttactaccaggcctttttctgtgtccactggagagcttgagctcacactcaaagatcagaggacctacagagagggctctttggtttgaggaccatggcttacctttcctgcctttgacccatcacaccccatttcctcctctttccctctccccgctgccaaaaaaaaaaaaaaggaaacgtttatcatgaatcaacagggtttcagtccttatcaaagagagatgtggaaagagctaaagaaaccaccctttgttcccaactccactttacccatattttatgcaacacaaacactgtccttttgggtccctttcttacagatggacctcttgagaagaattatcgtattccacgtttttagccctcaggttaccaagataaatatatgtatatataacctttattattgctatatctttgtggataatacattcaggtggtgctgggtgatttattataatctgaacctaggtatatcctttggtcttccacagtcatgttgaggtgggctccctggtatggtaaaaagccaggtataatgtaacttcaccccagcctttgtactaagctcttgatagtggatatactcttttaagtttagccccaatatagggtaatggaaatttcctgccctctgggttccccatttttactattaagaagaccagtgataatttaataatgccaccaactctggcttagttaagtgagagtgtgaactgtgtggcaagagagcctcacacctcactaggtgcagagagcccaggccttatgttaaaatcatgcacttgaaaagcaaaccttaatctgcaaagacagcagcaagcattatacggtcatcttgaatgatccctttgaaattttttttttgtttgtttgtttaaatcaagcctgaggctggtgaacagtagctacacacccatattgtgtgttctgtgaatgctagctctcttgaatttggatattggttattttttatagagtgtaaaccaagttttatattctgcaatgcgaacaggtacctatctgtttctaaataaaactgtttacattcaaaaa

SEQ ID NO: 736 - DNA, 1154 bp, Homo sapiens
gatctctcctaatttttccttcttccccaactcagatggatgttacatccctgcttaacaacaaaaaaagaccccccgccccgcaaaatccacactgaccaccccctttaacaaaacaaaaccaaaaacaaacaaaaatataagaaagaaacaaaacccaagcccagaaccctgctttcaagaagaagtaaatgggttggccgcttctttgccaggtcctgcgccttgctcctttggttcgttctaaagatagaaattccaggttgctcgtgcctgcttttgacgttgggggttaaaaaatgaggttttgctgtctcaacaagcaaagaaaatcctatttcctttaagcttcactcgttctcattctcttccagaaacgcctgccccacctctccaaaccgagagaaaaaacgaaatgcggataaaaacgcaccctagcagcagtcctttatacgacacccccgggaggcctgcggggtcggatgattcaagctcacggggacgagcaggagcgctctcgacttttctagagcctcagcgtcctaggactcacctttccctgatcctgcaccgtccctctcctggccccagactctccctcccactgttcacgaagcccaggtggccgtcggccggggagcggagggggcgcgtggggtgcaggcggcgccaaggcgctgcacctgtgggcgcggggcgagggcccctcccggcgcgagcgggcgcagttccccggcggcgccgctaggggtctctctcgggtgccgagcggggtgggccggatcagctgactcgcctggctctgagccccgccgccgcgctcgggctccgtcagtttcctcggcagcggtaggcgagagcacgcggaggagcgtgcgcgggggccccgggagacggcggcggtggcggcgcgggcagagcaaggacgcggcggatcccactcgcacagcagcgcactcggtgccccgcgcagggtcgcgatgctgcccggtttggcactgctcctgctggccgcctggacggctcgggcgctggaggtgggtgccgcgcctcggaaggcggggggaggctgcacggtggggacgcgataccccccaagaccttaacccaagtctttaatgcagagaagccgggggtccgtcaatgggacccct

SEQ ID NO: 737 - DNA, 2921 bp, Homo sapiens
agcctgtggagacgggacagccctgtcccactcactctttcccctgccgctcctgccggcagctccaaccatgggaggccgcgtctttctcgcattctgtgtctggctgactctgccgggagctgaaacccaggactccaggggctgtgcccggtggtgccctcagaactcctcgtgtgtcaatgccaccgcctgtcgctgcaatccagggttcagctctttttctgagatcatcaccaccccgacggagacttgtgacgacatcaacgagtgtgcaacaccgtcgaaagtgtcatgcggaaaattctcggactgctggaacacagaggggagctacgactgcgtgtgcagcccgggatatgagcctgtttctggggcaaaaacattcaagaatgagagcgagaacacctgtcaagatgtggacgagtgcagctccgggcagcatcagtgtgacagctccaccgtctgcttcaacaccgtgggttcatacagctgccgctgccgcccaggctggaagcccagacacggaatcccgaataaccaaaaggacactgtctgtgaagatatgactttctccacctggaccccgccccctggagtccacagccagacgctttcccgattcttcgacaaagtccaggacctgggcagagactccaagacaagctcagccgaggtcaccatccagaatgtcatcaaattggtggatgaactgatggaagctcctggagacgtagaggccctggcgccacctgtccggcacctcatagccacccagctgctctcaaaccttgaagatatcatgaggatcctggccaagagcctgcctaaaggccccttcacctacatttccccttcgaacacagagctgaccctgatgatccaggagcggggggacaagaacgtcactatgggtcagagcagcgcacgcatgaagctgaattgggctgtggcagctggagccgaggatccaggccccgccgtggcgggcatcctctccatccagaacatgacgacattgctggccaatgcctccttgaacctgcattccaagaagcaagccgaactggaggagatatatgaaagcagcatccgtggtgtccaactcagacgcctctctgccgtcaactccatctttctgagccacaacaacaccaaggaactcaactcccccatccttttcgccttctcccaccttgagtcctccgatggggaggcgggaagagaccctcctgccaaggacgtgatgcctgggccacggcaggagctgctctgtgccttctggaagagtgacagcgacaggggagggcactgggccaccgaggtctgccaggtgctgggcagcaagaacggcagcaccacctgccaatgcagccacctgagcagctttacgatccttatggctcattatgacgtggaggactggaagctgaccctgatcaccagggtgggactggcgctgtcactcttctgcctgctgctgtgcatcctcactttcctgctggtgcggcccatccagggctcgcgcaccaccatacacctgcacctctgcatctgcctcttcgtgggctccaccatcttcctggccggcatcgagaacgaaggcggccaggtggggctgcgctgccgcctggtggccgggctgctgcactactgtttcctggccgccttctgctggatgagcctcgaaggcctggagctctactttcttgtggtgcgcgtgttccaaggccagggcctgagtacgcgctggctctgcctgatcggctatggcgtgcccctgctcatcgtgggcgtctcggctgccatctacagcaagggctacggccgccccagatactgctggttggactttgagcagggcttcctctggagcttcttgggacctgtgaccttcatcattttgtgcaatgctgtcattttcgtgactaccgtctggaagctcactcagaagttttctgaaatcaatccagacatgaagaaattaaagaaggcgagggcgctgaccatcacggccatcgcgcagctcttcctgttgggctgcacctgggtctttggcctgttcatcttcgacgatcggagcttggtgctgacctatgtgtttaccatcctcaactgcctgcagggcgccttcctctacctgctgcactgcctgctcaacaagaaggttcgggaagaataccggaagtgggcctgcctagttgctggggggagcaagtactcagaattcacctccaccacgtctggcactggccacaatcagacccgggccctcagggcatcagagtccggcatatgaaggcgcatggttctggacggcccagcagctcctgtggccacagcagctttgtacacgaagaccatccatcctcccttcgtccaccactctactccctccaccctccctccctgatcccgtgtgccaccaggagggagtggcagctatagtctggcaccaaagtccaggacacccagtggggtggagtcggagccactggtcctgctgctggctgcctctctgctccaccttgtgacccagggtggggacaggggctggcccagggctgcaatgcagcatgttgccctggcacctgtggccagtactcgggacagactaagggcgcttgtcccatcctggacttttcctctcatgtctttgctgcagaactgaagagactaggcgctggggctcagcttccctcttaagctaagactgatgtcagaggccccatggcgaggccccttggggccactgcctgaggctcacggtacagaggcctgccctgcctggccgggcaggaggttctcactgttgtgaaggttgtagacgttgtgtaatgtgtttttatctgttaaaatttttcagtgttgacacttaaaattaaacacatgcatacagaaaaaaaaaaaaaaaaaaaaaa

SEQ ID NO: 738 - DNA, 1883 bp, Homo sapiens
ttccacaaacttaaaaccatgaaacatctattattgctactattgtgtgtttttctagttaagtcccaaggtgtcaacgacaatgaggagggtttcttcagtgcccgtggtcatcgaccccttgacaagaagagagaagaggctcccagcctgaggcctgccccaccgcccatcagtggaggtggctatcgggctcgtccagccaaagcagctgccactcaaaagaaagtagaaagaaaagcccctgatgctggaggctgtcttcacgctgacccagacctgggggtgttgtgtcctacaggatgtcagttgcaagaggctttgctacaacaggaaaggccaatcagaaatagtgttgatgagttaaataacaatgtggaagctgtttcccagacctcctcttcttcctttcagtacatgtatttgctgaaagacctgtggcaaaagaggcagaagcaagtaaaagataatgaaaatgtagtcaatgagtactcctcagaactggaaaagcaccaattatatatagatgagactgtgaatagcaatatcgcaactaaccttcgtgtgcttcgttcaatcctagaaaacctgagaagcaaaatacaaaagttagaatctgatgtctcagctcaaatggaatattgtcgcaccccatgcactgtcagttgcaatattcctgtggtgtctggcaaagaatgtgaggaaattatcaggaaaggaggtgaaacatctgaaatgtatctcattcaacctgacagttctgtcaaaccgtatagagtatactgtgacatgaatacagaaaatggaggatggacagtgattcagaaccgtcaagacggtagtgttgactttggcaggaaatgggatccatataaacagggatttggaaatgttgcaaccaacacagatgggaagaattactgtggcctaccaggtgaatattggcttggaaatgataaaattagccagcttaccaggatgggacccacagaacttttgatagaaatggaggactggaaaggagacaaagtaaaggctcactatggaggattcactgtacagaatgaagccaacaaataccagatctcagtgaacaaatacagaggaacagccggtaatgccctcatggatggagcatctcagctgatgggagaaaacaggaccatgaccattcacaacggcatgttcttcagcacgtatgacagagacaatgacggctggttaacatcagatcccagaaaacagtgttctaaagaagacggtggtggatggtggtataatagatgtcatgcagccaatccaaacggcagatactactggggtggacagtacacctgggacatggcaaagcatggcacagatgatggtgtagtatggatgaattggaaggggtcatggtactcaatgaggaagatgagtatgaagatcaggcccttcttcccacagcaatagtccccaatacgtagatttttgctcttctgtatgtgacaacatttttgtacattatgttattggaattttctttcatacattatattcctctaaaactctcaagcagacgtgagtgtgactttttgaaaaaagtataggataaattacattaaaatagcacatgattttcttttgttttcttcatttctcttgctcaccaagaagtaacaaaagtatagttttgacagagttggtgttcataatttcagttctagttgattgcgagaattttcaaataaggaagaggggtcttttatccttgtcgtaggaaaaccatgacggaaaggaaaaactgatgtttaaaagtccacttttaaaactatatttatttatgtaggatctgtcaaagaaaacttccaaaaagatttattaattaaaccagactctgttgc

SEQ ID NO: 739 - DNA, 3714 bp, Homo sapiens; identical to SEQ ID NO: 122

SEQ ID NO: 740 - DNA, 1971 bp, Homo sapiens
gcgcacgccggcctcgaagaacttctgcttgggtggctgaactctgatcttgacctagagtcatggccatggcaaccaaaggaggtactgtcaaagctgcttcaggattcaatgccatggaagatgcccagaccctgaggaaggccatgaaagggctcggcaccgatgaagacgccattattagcgtccttgcctaccgcaacaccgcccagcgccaggagatcaggacagcctacaagagcaccatcggcagggacttgatagacgacctgaagtcagaactgagtggcaacttcgagcaggtgattgtggggatgatgacgcccacggtgctgtatgacgtgcaagagctgcgaagggccatgaagggagccggcactgatgagggctgcctaattgagatcctggcctcccggacccctgaggagatccggcgcataagccaaacctaccagcagcaatatggacggagccttgaagatgacattcgctctgacacatcgttcatgttccagcgagtgctggtgtctctgtcagctggtgggagggatgaaggaaattatctggacgatgctctcgtgagacaggatgcccaggacctgtatgaggctggagagaagaaatgggggacagatgaggtgaaatttctaactgttctctgttcccggaaccgaaatcacctgttgcatgtgtttgatgaatacaaaaggatatcacagaaggatattgaacagagtattaaatctgaaacatctggtagctttgaagatgctctgctggctatagtaaagtgcatgaggaacaaatctgcatattttgctgaaaagctctataaatcgatgaagggcttgggcaccgatgataacaccctcatcagagtgatggtttctcgagcagaaattgacatgttggatatccgggcacacttcaagagactctatggaaagtctctgtactcgttcatcaagggtgacacatctggagactacaggaaagtactgcttgttctctgtggaggagatgattaaaataaaaatcccagaaggacaggaggattctcaacactttgaatttttttaacttcatttttctacactgctattatcattatctcagaatgcttatttccaattaaaacgcctacagctgcctcctagaatatagactgtctgtattattattcacctataattagtcattatgatgctttaaagctgtacttgcatttcaaagcttataagatataaatggagattttaaagtagaaataaatatgtattccatgtttttaaaagattactttctactttgtgtttcacagacattgaatatattaaattattccatattttcttttcagtgaaaaattttttaaatggaagactgttctaaaatcacttttttccctaatccaatttttagagtggctagtagtttcttcatttgaaattgtaagcatccggtcagtaagaatgcccatccagttttctatatttcatagtcaaagccttgaaagcatctacaaatctctttttttaggttttgtccatagcatcagttgatccttactaagtttttcatgggagacttccttcatcacatcttatgttgaaatcactttctgtagtcaaagtataccaaaaccaatttatctgaactaaattctaaagtatggttatacaaaccatatacatctggttaccaaacataaatgctgaacattccatattattatagttaatgtcttaatccagcttgcaagtgaatggaaaaaaaaataagcttcaaactaggtattctgggaatgatgtaatgctctgaatttagtatgatataaagaaaacttttttgtgctaaaaatactttttaaaatcaattttgttgattgtagtaatttctatttgcactgtgcctttcaactccagaaacattctaagatgtacttggatttaattaaaaagttcactttgt

SEQ ID NO: 741 - DNA, 3149 bp, Homo sapiens; identical to SEQ ID NO: 124

SEQ ID NO: 742 - DNA, 3322 bp, Homo sapiens; identical to SEQ ID NO: 125

SEQ ID NO: 743 - DNA, 5431 bp, Homo sapiens; identical to SEQ ID NO: 127

SEQ ID NO: 744 - DNA, 737 bp, Homo sapiens
ggcgagaatgaagactattctcagcaatcagactgtcgacattccagaaaatgtcgacattactctgaagggacgcacagttatcgtgaagggccccagaggaaccctgcggagggacttcaatcacatcaatgtagaactcagccttcttggaaagaaaaaaaagaggctccgggttgacaaatggtggggtaacagaaaggaactggctaccgttcggactatttgtagtcatgtacagaacatgatcaagggtgttacactgggcttccgttacaagatgaggtctgtgtatgctcacttccccatcaacgttgttatccaggagaatgggtctcttgttgaaatccgaaatttcttgggtgaaaaatacatccgcagggttcggatgagaccaggtgttgcttgttcagtatctcaagcccagaaagatgaattaatccttgaaggaaatgacattgagcttgtttcaaattcagcggctttgattcagcaagccacaacagttaaaaacaaggatatcaggaaattttggatggtatctatgtctctgaaaaaggaactgttcagcaggctgatgaataagatctaagagttacctggctacagaaagaagatgccagatgacacttaagacctacttgtgatatttaaatgatgcaataaaagacctattgatttggaccttcttcttaaaaaaaaaaaaaaaaaacccggggctatatggggggggggaa

SEQ ID NO: 745 - DNA, 1414 bp, Homo sapiens; identical to SEQ ID NO: 129

SEQ ID NO: 746 - DNA, 2619 bp, Homo sapiens; identical to SEQ ID NO: 130

SEQ ID NO: 747 - DNA, 2414 bp, Homo sapiens
gggcgcagggacccgaggcctccgctgcggctggattctgctgcgaaccggagaccatggccaaaccagcacagggtgccaagtaccggggctccatccatgacttcccaggctttgaccccaaccaggatgccgaggctctgtacactgccatgaagggctttggcagtgacaaggaggccatactggacataatcacctcacggagcaacaggcagaggcaggaggtctgccagagctacaagtccctctacggcaaggacctcattgctgatttaaagtatgaattgacgggcaagtttgaacggttgattgtgggcctgatgaggccacctgcctattgtgatgccaaagaaattaaagatgccatctcgggcattggcactgatgagaagtgcctcattgagatcttggcttcccggaccaatgagcagatgcaccagctggtggcagcatacaaagatgcctacgagcgggacctggaggctgacatcatcggcgacacctctggccacttccagaagatgcttgtggtcctgctccagggaaccagggaggaggatgacgtagtgagcgaggacctggtacaacaggatgtccaggacctatacgaggcaggggaactgaaatggggaacagatgaagcccagttcatttacatcttgggaaatcgcagcaagcagcatcttcggttggtgttcgatgagtatctgaagaccacagggaagccgatgaaggccagcatccgaggggagctgtctggggactttgagaagctaatgctggccgtagtgaagtgtatccggagcaccccggaatattttgctgaaaggctcttcaaggctatgaagggcctggggactcgggacaacaccctgatccgcatcatggtctcccgtagtgagttggacatgctcgacattcgggagatcttccggaccaagtatgagaagtccctctacagcatgatcaagaatgacacctctggcgagtacaagaagactctgctgaagctgtctgggggagatgatgatgctgctggccagttcttcccggaggcagcgcaggtggcctatcagatgtgggaacttagtgcagtggcccgagtagagctgaagggaactgtgcgcccagccaatgacttcaaccctgacgcagatgccaaagcgctgcggaaagccatgaagggactcgggactgacgaagacacaatcatcgatatcatcacgcaccgcagcaatgtccagcggcagcagatccggcagaccttcaagtctcactttggccgggacttaatgactgacctgaagtctgagatctctggagacctggcaaggctgattctggggctcatgatgccaccggcccattacgatgccaagcagttgaagaaggccatggagggagccggcacagatgaaaaggctcttattgaaatcctggccactcggaccaatgctgaaatccgggccatcaatgaggcctataaggaggactatcacaagtccctggaggatgctctgagctcagacacatctggccacttcaggaggatcctcatttctctggccacggggcatcgtgaggagggaggagaaaacctggaccaggcacgggaagatgcccaggtggctgctgagatcttggaaatagcagacacacctagtggagacaaaacttccttggagacacgtttcatgacgatcctgtgtacccggacgtatccgcacctccggagagtcttccaggagttcatcaagatgaccaactatgacgtggagcacaccatcaagaaggagatgtctggggatgtcagggatgcatttgtggccattgttcaaagtgtcaagaacaagcctctcttctttgccgacaaactttacaaatccatgaagggtgctggcacagatgagaagactctgaccaggatcatggtatcccgcagtgagattgacctgctcaacatccggagggaattcattgagaaatatgacaagtctctccaccaagccattgagggtgacacctccggagacttcctgaaggccttgctggctctctgtggtggtgaggactagggccacagctttggcgggcacttctgccaagaaatggttatcagcaccagccgccatggccaagcctgattgttccagctccagagactaaggaaggggcaggggtggggggaggggttgggttgggctcttatcttcatggagcttaggaaacgctcccactcccacgggccatcgagggccagcacggctgagcggtgaaaaaccgtagccatagatcctgtccacctccactcccctctgaccctcaggctttcccagcttcctccccttgctacagcctctgccctggtttggctatgtcagatccaataaacatcctgaacctctgtctgt

SEQ ID NO: 748 - DNA, 2945 bp, Homo sapiens; identical to SEQ ID NO: 132

SEQ ID NO: 749 - DNA, 5047 bp, Homo sapiens; identical to SEQ ID NO: 133

SEQ ID NO: 750 - DNA, 15164 bp, Homo sapiens; identical to SEQ ID NO: 134

SEQ ID NO: 751 - DNA, 1981 bp, Homo sapiens; identical to SEQ ID NO: 135

SEQ ID NO: 752 - DNA, 617 bp, Homo sapiens
ggggaagaagttggtgtttcgctgggccctggtactgaagacgcggtccgggtcgcccctagctgtttcctactcacccaaagccccgcacccgccttttctctctctcctctggcaggatgaggcgtgcaggcctgggtgaaggagtacctcctggcaactatgggaactatggctatgctaatagtgggtatagtgcctgtgaagaagaaaatgagaggctcactgaaagtctgagaagcaaagtaactgctataaaatctctttccattgaaataggccatgaagttaaaacccagaataaattattagctgaaatggattcacaatttgattccacaactggatttctaggtaaaactatgggcaaactgaagattttatccagagggagccaaacaaagctgctgtgctatatgatgctgttttctttatttgtcttttttatcatttattggattattaaactgaggtgatgcatgtaattgtgaatttggaatttgttccaacttaatggcttgcagtgcagtaccactttgataaaaatcagcatcaaaacattcccagtgttcaaatacgtggcattttccattgaaaattgctgaattttagactta

SEQ ID NO: 753 - DNA, 868 bp, Homo sapiens
caggtcaacggatcatctgtttctgaccattccttcccgttcctgaccccagggagtgcagggtgtcctagccaagccggcgtccctcctagtagtaccgctgctctctaacctcaggacgtcaagggcctagagcgacagatgtttcccagcagggggttctgaggctgtgcgcccagatcgcgagagaggcaagtggggtgacgaggtcgtgcactgagggtggacgtagaggccaggagtagcaggcggccggggaaaagaggtggagaaaggaaaaaagaggagaaaagtggaggagggcgagtaggggggtggggcagagaggggcgggcccgagtgcgccccccgcccccagccccgctctgccagctccctcccagcccagccggctacatctggcggctgccctcccttgtttccgctgcatccagacttcctcaggcggtggctggaggctgcgcatctggggctttaaacatacaaagggattgccaggacctgcggcggcggcggcggcggcgggggctggggcgcgggggccggaccatgagccgctgagccgggcaaaccccaggccaccgagccagcggaccctcggagcgcagccctgcgccgcggaccaggctccaaccaggcggcgaggcggccacacgcaccgagccagcgacccccgggcgacgcgcggggccagggagcgctacgatggaggcgctaatggcccggggcgcgctcacgggtcccctgagggcgctctgtctcctgggctgcctgctgagccacgccgccgccgcgccgtcgcccatcatcaagttccccggcgatgtcgcccccaaaacggacaaagagttggcagtggtgagttgct

SEQ ID NO: 754 - DNA, 3074 bp, Homo sapiens; identical to SEQ ID NO: 138

SEQ ID NO: 755 - DNA, 6728 bp, Homo sapiens
agcagacgggagtttctcctcggggtcggagcaggaggcacgcggagtgtgaggccacgcatgagcggacgctaaccccctccccagccacaaagagtctacatgtctagggtctagacatgttcagctttgtggacctccggctcctgctcctcttagcggccaccgccctcctgacgcacggccaagaggaaggccaagtcgagggccaagacgaagacatcccaccaatcacctgcgtacagaacggcctcaggtaccatgaccgagacgtgtggaaacccgagccctgccggatctgcgtctgcgacaacggcaaggtgttgtgcgatgacgtgatctgtgacgagaccaagaactgccccggcgccgaagtccccgagggcgagtgctgtcccgtctgccccgacggctcagagtcacccaccgaccaagaaaccaccggcgtcgagggacccaagggagacactggcccccgaggcccaaggggacccgcaggcccccctggccgagatggcatccctggacagcctggacttcccggaccccccggaccccccggacctcccggaccccctggcctcggaggaaactttgctccccagctgtcttatggctatgatgagaaatcaaccggaggaatttccgtgcctggccccatgggtccctctggtcctcgtggtctccctggcccccctggtgcacctggtccccaaggcttccaaggtccccctggtgagcctggcgagcctggagcttcaggtcccatgggtccccgaggtcccccaggtccccctggaaagaatggagatgatggggaagctggaaaacctggtcgtcctggtgagcgtgggcctcctgggcctcagggtgctcgaggattgcccggaacagctggcctccctggaatgaagggacacagaggtttcagtggtttggatggtgccaagggagatgctggtcctgctggtcctaagggtgagcctggcagccctggtgaaaatggagctcctggtcagatgggcccccgtggcctgcctggtgagagaggtcgccctggagcccctggccctgctggtgctcgtggaaatgatggtgctactggtgctgccgggccccctggtcccaccggccccgctggtcctcctggcttccctggtgctgttggtgctaagggtgaagctggtccccaagggccccgaggctctgaaggtccccagggtgtgcgtggtgagcctggcccccctggccctgctggtgctgctggccctgctggaaaccctggtgctgatggacagcctggtgctaaaggtgccaatggtgctcctggtattgctggtgctcctggcttccctggtgcccgaggcccctctggaccccagggccccggcggccctcctggtcccaagggtaacagcggtgaacctggtgctcctggcagcaaaggagacactggtgctaagggagagcctggccctgttggtgttcaaggaccccctggccctgctggagaggaaggaaagcgaggagctcgaggtgaacccggacccactggcctgcccggaccccctggcgagcgtggtggacctggtagccgtggtttccctggcgcagatggtgttgctggtcccaagggtcccgctggtgaacgtggttctcctggccccgctggccccaaaggatctcctggtgaagctggtcgtcccggtgaagctggtctgcctggtgccaagggtctgactggaagccctggcagccctggtcctgatggcaaaactggcccccctggtcccgccggtcaagatggtcgccccggacccccaggcccacctggtgcccgtggtcaggctggtgtgatgggattccctggacctaaaggtgctgctggagagcccggcaaggctggagagcgaggtgttcccggaccccctggcgctgtcggtcctgctggcaaagatggagaggctggagctcagggaccccctggccctgctggtcccgctggcgagagaggtgaacaaggccctgctggctcccccggattccagggtctccctggtcctgctggtcctccaggtgaagcaggcaaacctggtgaacagggtgttcctggagaccttggcgcccctggcccctctggagcaagaggcgagagaggtttccctggcgagcgtggtgtgcaaggtccccctggtcctgctggaccccgaggggccaacggtgctcccggcaacgatggtgctaagggtgatgctggtgcccctggagctcccggtagccagggcgcccctggccttcagggaatgcctggtgaacgtggtgcagctggtcttccagggcctaagggtgacagaggtgatgctggtcccaaaggtgctgatggctctcctggcaaagatggcgtccgtggtctgaccggccccattggtcctcctggccctgctggtgcccctggtgacaagggtgaaagtggtcccagcggccctgctggtcccactggagctcgtggtgcccccggagaccgtggtgagcctggtccccccggccctgctggctttgctggcccccctggtgctgacggccaacctggtgctaaaggcgaacctggtgatgctggtgccaaaggcgatgctggtccccctgggcctgccggacccgctggaccccctggccccattggtaatgttggtgctcctggagccaaaggtgctcgcggcagcgctggtccccctggtgctactggtttccctggtgctgctggccgagtcggtcctcctggcccctctggaaatgctggaccccctggccctcctggtcctgctggcaaagaaggcggcaaaggtccccgtggtgagactggccctgctggacgtcctggtgaagttggtccccctggtccccctggccctgctggcgagaaaggatcccctggtgctgatggtcctgctggtgctcctggtactcccgggcctcaaggtattgctggacagcgtggtgtggtcggcctgcctggtcagagaggagagagaggcttccctggtcttcctggcccctctggtgaacctggcaaacaaggtccctctggagcaagtggtgaacgtggtccccccggtcccatgggcccccctggattggctggaccccctggtgaatctggacgtgagggggctcctgctgccgaaggttcccctggacgagacggttctcctggcgccaagggtgaccgtggtgagaccggccccgctggaccccctggtgctcctggtgctcctggtgcccctggccccgttggccctgctggcaagagtggtgatcgtggtgagactggtcctgctggtcccgccggtcccgtcggccccgtcggcgcccgtggccccgccggaccccaaggcccccgtggtgacaagggtgagacaggcgaacagggcgacagaggcataaagggtcaccgtggcttctctggcctccagggtccccctggccctcctggctctcctggtgaacaaggtccctctggagcctctggtcctgctggtccccgaggtccccctggctctgctggtgctcctggcaaagatggactcaacggtctccctggccccattgggccccctggtcctcgcggtcgcactggtgatgctggtcctgttggtccccccggccctcctggacctcctggtccccctggtcctcccagcgctggtttcgacttcagcttcctgccccagccacctcaagagaaggctcacgatggtggccgctactaccgggctgatgatgccaatgtggttcgtgaccgtgacctcgaggtggacaccaccctcaagagcctgagccagcagatcgagaacatccggagcccagagggaagccgcaagaaccccgcccgcacctgccgtgacctcaagatgtgccactctgactggaagagtggagagtactggattgaccccaaccaaggctgcaacctggatgccatcaaagtcttctgcaacatggagactggtgagacctgcgtgtaccccactcagcccagtgtggcccagaagaactggtacatcagcaagaaccccaaggacaagaggcatgtctggttcggcgagagcatgaccgatggattccagttcgagtatggcggccagggctccgaccctgccgatgtggccatccagctgaccttcctgcgcctgatgtccaccgaggcctcccagaacatcacctaccactgcaagaacagcgtggcctacatggaccagcagactggcaacctcaagaaggccctgctcctcaagggctccaacgagatcgagatccgcgccgagggcaacagccgcttcacctacagcgtcactgtcgatggctgcacgagtcacaccggagcctggggcaagacagtgattgaatacaaaaccaccaagtcctcccgcctgcccatcatcgatgtggcccccttggacgttggtgccccagaccaggaattcggcttcgacgttggccctgtctgcttcctgtaaactccctccatcccaacctggctccctcccacccaaccaactttccccccaacccggaaacagacaagcaacccaaactgaacccccccaaaagccaaaaaatgggagacaatttcacatggactttggaaaatatttttttcctttgcattcatctctcaaacttagtttttatctttgaccaaccgaacatgaccaaaaaccaaaagtgcattcaaccttaccaaaaaaaaaaaaaaaaaaaaaagaataaataaataagtttttaaaaaaggaagcttggtccacttgcttgaagacccatgcgggggtaagtccctttctgcccgttgggttatgaaaccccaatgctgccctttctgctcctttctccacaccccccttggcctcccctccactccttcccaaatctgtctccccagaagacacaggaaacaatgtattgtctgcccagcaatcaaaggcaatgctcaaacacccaagtggcccccaccctcagcccgctcctgcccgcccagcacccccaggccctggggacctggggttctcagactgccaaagaagccttgccatctggcgctcccatggctcttgcaacatctccccttcgtttttgagggggtcatgccgggggagccaccagcccctcactgggttcggaggagagtcaggaagggccacgacaaagcagaaacatcggatttggggaacgcgtgtcatcccttgtgccgcaggctgggcgggagagactgttctgttctgttccttgtgtaactgtgttgctgaaagactacctcgttcttgtcttgatgtgtcaccggggcaactgcctgggggcggggatgggggcagggtggaagcggctccccatttttataccaaaggtgctacatctatgtgatgggtggggtggggagggaatcactggtgctatagaaattgagatgcccccccaggccagcaaatgttcctttttgttcaaagtctatttttattccttgatattttttctttctttttttttttttttgtggatggggacttgtgaatttttctaaaggtgctatttaacatgggaggagagcgtgtgcgctccagcccagcccgctgctcactttccaccctctctccacctgcctctggcttctcaggcctctgctctccgacctctctcctctgaaaccctcctccacagctgcagcccatcctcccggctccctcctagtctgtcctgcgtcctctgtccccgggtttcagagacaacttcccaaagcacaaagcagtttttccctaggggtgggaggaagcaaaagactctgtacctattttgtatgtgtataataatttgagatgtttttaattattttgattgctggaataaagcatgtggaaatgacccaaacataatccgcagtggcctcctaatttccttctttggagttgggggaggggtagacatggggaaggggccttggggtgatgggcttgccttccattcctgccctttccctccccactattctcttctagatccctccataaccccactcccctttctctcacccttcttataccgcaaacctttctacttcctctttcattttctattcttgcaatttccttgcaccttttccaaatcctcttctcccctgcaataccatacaggcaatccacgtgcacaacacacacacacactcttcacatctggggttgtccaaacctcatacccactccccttcaagcccatccactctccaccccctggatgccctgcacttggtggcggtgggatgctcatggatactgggagggtgaggggagtggaacccgtgaggaggacctgggggcctctccttgaactgacatgaagggtcatctggcctctgctcccttctcacccacgctgacctcctgccgaaggagcaacgcaacaggagaggggtctgctgagcctggcgagggtctgggagggaccaggaggaaggcgtgctccctgctcgctgtcctggccctgggggagtgagggagacagacacctgggagagctgtggggaaggcactcgcaccgtgctcttgggaaggaaggagacctggccctgctcaccacggactgggtgcctcgacctcctgaatccccagaacacaacccccctgggctggggtggtctggggaaccatcgtgcccccgcctcccgcctactcctttttaagctt

SEQ ID NO: 756 - DNA, 1804 bp, Homo sapiens; identical to SEQ ID NO: 141

SEQ ID NO: 757 - DNA, 614 bp, Homo sapiens; identical to SEQ ID NO: 720

SEQ ID NO: 758 - DNA, 2517 bp, Homo sapiens; identical to SEQ ID NO: 143

SEQ ID NO: 759 - DNA, 797 bp, Homo sapiens
gaggcgccccgctcttctcctctgccccgggcccgcgaggccacgcgtcgccgctcgagagatgatgcaggacgtgtccagctcgccagtctcgccggccgacgacagcctgagcaacagcgaggaagagccagaccggcagcagccgccgagcggcaagcgcgggggacgcaagcggcgcagcagcaggcgcagcgcgggcggcggcgcggggcccggcggagccgcgggtgggggcgtcggaggcggcgacgagccgggcagcccggcccagggcaagcgcggcaagaagtctgcgggctgtggcggcggcggcggcgcgggcggcggcggcggcagcagcagcggcggcgggagtccgcagtcttacgaggagctgcagacgcagcgggtcatggccaacgtgcgggagcgccagcgcacccagtcgctgaacgaggcgttcgccgcgctgcggaagatcatccccacgctgccctcggacaagctgagcaagattcagaccctcaagctggcggccaggtacatcgacttcctctaccaggtcctccagagcgacgagctggactccaagatggcaagctgcagctatgtggctcacgagcggctcagctacgccttctcggtctggaggatggagggggcctggtccatgtccgcgtcccactagcaggcggagccccccaccccctcagcagggccggagacctaggtaaggaccgcgccgctgcaccccttcgcctctcaggtggcagacggcaggccggccaggccgcggttcccagtccacctcgatt

SEQ ID NO: 760 - DNA, 819 bp, Homo sapiens
  misc_feature 742, 766, 800: n = A,T,C or G
ttggtgatcagaatcagaagttcggatttgaagttggtcctgtttgttttcttggctaagattaagacaaagaacatatcaaatcaacagaaaatataccttggtgccaccaacccattttgtgccacatgcaagttttgaataaggatggtatagaaaacaacgctgcatatacaggtaccatttaggaaataccgatgcctttgtgggggcagaatcacatggcaaaagctttgaaaatcataaagatataagttggtgtggctaagatggaaacagggctgattcttgattcccaattctcaactctccttttcctatttgaatttctttggtgctgtagaaaacaaaaaaagaaaaatatatattcataaaaaatatggtgctcattctcatccatccaggatgtactaaaacagtgtgtttaataaattgtaattattttgtgtacagttctatactgttatctgtgtccatttccaaaacttgcacgtgtccctgaattccatctgactctaattttatgagaattgcagaactctgatggcaataaatatatgtattatgaaaaaataaagttgtaatttctgatgactctaagtccctttctttggttaataataaaatgcctttgtatatattgatgttgaagagttcaattatttgatgtcgccaacaaaattctcagagggcaaaaatctggaagacttttggaagcacactctgatcaactcttctctgncgacagtcattttgctgaattcancccaaaatattatgcattttgatgctttattcangctttcctcaacttttctt

SEQ ID NO: 761 - DNA, 3401 bp, Homo sapiens; identical to SEQ ID NO: 147

SEQ ID NO: 762 - DNA, 2001 bp, Homo sapiens
aataaacctgtttggtatggtcttgatatgaacagagggtctcagttcgcttatggagaccaccaatcacctaatacagccattactcagatgacttttttgcgccttttatcaaaagaagcctcccagaacatcacttacatctgtaaaaacagtgtaggatacatggacgatcaagctaagaacctcaaaaaagctgtggttctcaaaggggcaaatgacttagatatcaaagcagagggaaatattagattccggtatatcgttcttcaagacacttgctctaagcggaatggaaatgtgggcaagactgtctttgaatatagaacacagaatgtggcacgcttgcccatcatagatcttgctcctgtggatgttggcggctcagaccaggaattcggcgttgaaattgggccagtttgttttgtgtaaagtaagccaagacacatcgacaatgagcaccaccatcaatgaccaccgccattcacaagaactttgactgtttgaagttgatcctgagactcttgaagtaatggctgatcctgcatcagcattgtatatatggtcttaagtgcctggcctccttatccttcagaatatttattttacttacaatcctcaagttttaattgattttaaatatttttcaatacaacagtttaggtttaagatgaccaatgacaatgaccacctttgcagaaagtaaactgattgaataaataaatctccgttttcttcaatttatttcagtgtaatgaaaaagttgcttagtatttatgaggaaattcttcttcctggcaggtagcttaaagagtggggtatatagagccacaacacatgtttattttgcttggctgcagttgaaaaatagaaattagtgcccttttgtgacctctcattccaagattgtcaattaaaaatgagtttaaaatgtttaacttgtgatcgagacctacatgcatgtcttgatattgtgtaactataatagagactctttaaggagaatcttaaaaaaaaaaaacgtttctcactgtcttaaatagaatttttaaatagtatatattcagtggcattttggagaacaaagtgaatttacttcgacttcttaaatttttgtaaaagactataagtttagacatctttctcattcaaatttaaagatatctttctcctcttgatcaatctatcaatattgatagaagtcacactagtatataccatttaatacatttacactttcttatttaagaagatattgaatgcaaaataattgacatatagaactttacaaacatatgtccaaggactctaaattgagactcttccacatgtacaatctcatcatcctgaagcctataatgaagaaaaagatctagaaactgagttgtggagctgactctaatcaaatgtgatgattggaattagaccatttggcctttgaactttcataggaaaaatgacccaacatttcttagcatgagctacctcatctctagaagctgggatggacttactattcttgtttatattttagatactgaaaggtgctatgcttctgttattattccaagactggagataggcagggctaaaaaggtattattatttttcctttaatgatggtgctaaaattcttcctataaaattccttaaaaataaagatggtttaatcactaccattgtgaaaacataactgttagacttcccgtttctgaaagaaagagcatcgttccaatgcttgttcactgttcctctgtcatactgtatctggaatgctttgtaatacttgcatgcttcttagaccagaacatgtaggtccccttgtgtctcaatactttttttttcttaattgcatttgttggctctattttaatttttttcttttaaaataaacagctgggaccatcccaaaagacaagccatgcatacaactttggtcatgtatctctgcaaagcatcaaattaaatgcacgcttttgtcatgtcaaaaaaaaaaaaaaa

SEQ ID NO: 763 - DNA, 1240 bp, Homo sapiens
gatcatgccactgtactccagcctgggtgacagagcaagaccctatcttaaaaaaaagaaaaaatcctggatcagagaaagtgttatctacacattatatgatctaaggaaaaatattggtagaaaatgaggcaagcataataaccttgcctttcaattttctttgggcatctgattgcattttatccttaagagcccagaaacccagattcttagttaagctcaaacaaagccaaaagacaaagtaaggctggcacccctttcacagagcttctctacatttgaaaatgatttggagagttctgaaaagttcctcaactttttataaccctaaggtagccagccttcctcttggacaaaactcataaggtatctgtgttcgcttggttgtgagaatacataggatattccaaggggaaaaaaaacaagaagagtctaaatgtgtaggtcaagaaagaggcagagatgaaaaagaaatacaggaataaaaagaaatttgttagtgctgaagagacgaatattgaaaaagaaagtgagaaagaaggatgaaggaatgattcaaatatggaatataaggaggctgaggcaggataattgcttgaactcaggaggcggaggttgcagtgagccaagatcacatcattgcactccagcctgggtgacaggagcaaaactctgtcttaaaaaaaaaaaacaaaaaacaaagaagaagaagatagccagagagagagaaacagcatctataatgtgcattaaaacacaccaaggaggagacggaacttttcggtaagaaagaacccaaggaacaaaggggagctgggaccagatcgtgagaggagggaaaataggctaatggaagaaaggcaatacatgagctggggccaacacttccagggagcagcaagagctctcaccagtgtagtcataacatttggaatgagggtgtgagcaactgcaaattcccatctcccttctcattccagcctcattgtaacacacattctacgcctagcctggctttcttgctctccctcatctcattgtttcagcggaggccaaatctgaagtcctttccagggagtggctctgttcatcttattcgccagccaaagtaggaacagcgtaagaggagagagacacattcagcagccaaaggactcggtggaaagagcagaacaccatagacagtgagttatttgattacctgaaaccctaaagagacagagggaatgtgtgtatg

SEQ ID NO: 764 - DNA, 10558 bp, Homo sapiens; identical to SEQ ID NO: 151

SEQ ID NO: 765 - DNA, 1082 bp, Homo sapiens; identical to SEQ ID NO: 152

SEQ ID NO: 766 - DNA, 1322 bp, Homo sapiens
ctctaccggcgggatttgatggcgtgatgtctcacagaaagttctccgctcccagacatgggtccctcggcttcctgcctcggaagcgcagcagcaggcatcgtgggaaggtgaagagcttccctaaggatgacccgtccaagccggtccacctcacagccttcctgggatacaaggctggcatgactcacatcgtgcgggaagtcgacaggccgggatccaaggtgaacaagaaggaggtggtggaggctgtgaccattgtagagacaccacccatggtggttgtgggcattgtgggctacgtggaaacccctcgaggcctccggaccttcaagactgtctttgctgagcacatcagtgatgaatgcaagaggcgtttctataagaattggcataaatctaagaagaaggcctttaccaagtactgcaagaaatggcaggatgaggatggcaagaagcagctggagaaggacttcagcagcatgaagaagtactgccaagtcatccgtgtcattgcccacacccagatgcgcctgcttcctctgcgccagaagaaggcccacctgatggagatccaggtgaacggaggcactgtggccgagaagctggactgggcccgcgagaggcttgagcagcaggtacctgtgaaccaagtgtttgggcaggatgagatgatcgacgtcatcggggtgaccaagggcaaaggctacaaaggggtcaccagtcgttggcacaccaagaagctgccccgcaagacccaccgaggcctgcgcaaggtggcctgtattggggcatggcatcctgctcgtgtagccttctctgtggcacgcgctgggcagaaaggctaccatcaccgcactgagatcaacaagaagatttataagattggccagggctaccttatcaaggacggcaagctgatcaagaacaatgcctccactgactatgacctacctgacaagagcatcaaccctctgggtggctttgtccactatggtgaagtgaccaatgactttgtcatgctgaaaggctgtgtggtgggaaccaagaagcgggtgctcaccctccgcaagtccttgctggtgcagacgaagcggcgggctctggagaagattgaccttaagttcattgacaccacctccaagtttggccatggccgcttccagaccatggaggagaagaaagcattcatgggaccactgaaggaagaccgaattgcaaaggaagaaggagcttaatgccaggaacagattttgcagttggtggggtctcaataaaagttattttccaccaaaaaaaaaaaaaaaaaaaaaaaaaagaaa

SEQ ID NO: 767 - DNA, 1524 bp, Homo sapiens; identical to SEQ ID NO: 154

SEQ ID NO: 768 - DNA, 1074 bp, Homo sapiens
atgctcaagtgatctgcccgcctcagcctttcaaagtgctaggattacaggtgtgagccaccgtgcccggacttaatcccattctttaaacttgttttgttttgttcctctccaggaggctcccagccctttcggattggttgagaaaagtggcctggctggtctggggccagcggcacccaccctcccctcaatttgcccaactacccccccccacacagaactgcccaacgtacccgcccgaactgccaaccccacccacaatccctcccgccacaactgagggaggcggtgctgtaaacagctgactccagcaatgctgccacgtgaccactgcagctgcagctcactgttccactccttgtcctgggctaggtgggcactaccaggggctcctttggtaaggagtacgggtaggcacccggtcctgccaatccaccactggaacagctggggggacagcagacaggcacggtcggacagacttgacagatcaggcatcaggccctctgagctggtcccgggctctttaagcaggaacgtgaatggcctcaagatgtctcacatggtcccactagccctcctcctccctttgttccttacctccaggagggctgtctgcccttccttcctctgttctttggccttatgttccccgccaccacagaccttcccccgccccacccctctgcagacttagccgtgcattgcaggcatggaggattaatcagtgacaggaaggtgcgtctctcggagcggtgaccagctgtggtcaggagagcctcagcaggggccagccccaggagtctttcccgattcttgctcactgctcacccacctgctgctgccatgaggcaccttggggccttcctcttccttctgggggtcctgggggccctcactgagatgtgtggtgagtaactcgcctctatcctgtgcctctttcctcctgggtccttagtggggtggctagggcataggatcagggaacttacctgcccttctaagctcccatagcagtttgggcttagctggacctcagcatttacacatcctattgtgattgattatatg

SEQ ID NO: 769 - DNA, 3343 bp, Homo sapiens
gaattcgggatgtggagctggaagtgcctcctcttctgggctgtgctggtcacagccacactctgcaccgctaggccgtccccgaccttgcctgaacaagcccagccctggggagcccctgtggaagtggagtccttcctggtccaccccggtgacctgctgcagcttcgctgtcggctgcgggacgatgtgcagagcatcaactggctgcgggacggggtgcagctggcggaaagcaaccgcacccgcatcacaggggaggaggtggaggtgcaggactccgtgcccgcagactccggcctctatgcttgcgtaaccagcagcccctcgggcagtgacaccacctacttctccgtcaatgtttcagatgctctcccctcctcggaggatgatgatgatgatgatgactcctcttcagaggagaaagaaacagataacaccaaaccaaaccccgtagctccatattggacatccccagaaaagatggaaaagaaattgcatgcagtgccggctgccaagacagtgaagttcaaatgcccttccagtgggaccccaaaccccacactgcgctggttgaaaaatagcaaagaattcaaacctgaccacagaattggaggctacaaggtccgttatgccacctggagcatcataatggactctgtggtgccctctgacaagggcaactacacctgcattgtggagaatgagtacggcagcatcaaccacacataccagctggatgtcgtggagcggtcccctcaccggcccatcctgcaagcagggttgcccgccaacaaaacagtggccctgggtagcaacgtggagttcatgtgtaaggtgtacagtgacccgcagccgcacatccagtggctaaagcacatcgaggtgaatgggagcaagattggcccagacaacctgccttatgtccagatcttgaagactgctggagttaataccaccgacaaagagatggaggtgcttcacttaagaaatgtctcctttgaggacgcaggggagtatacgtgcttggcgggtaactctatcggactctcccatcactctgcatggttgaccgttctggaagccctggaagagaggccggcagtgatgacctcgcccctgtacctggagatcatcatctattgcacaggggccttcctcatctcctgcatggtggggtcggtcatcgtctacaagatgaagagtggtaccaagaagagtgacttccacagccagatggctgtgcacaagctggccaagagcatccctctgcgcagacaggtaacagtgtctgctgactccagtgcatccatgaactctggggttcttctggttcggccatcacggctctcctccagtgggactcccatgctagcaggggtctctgagtatgagcttcccgaagaccctcgctgggagctgcctcgggacagactggtcttaggcaaacccctgggagagggctgctttgggcaggtggtgttggcagaggctatcgggctggacaaggacaaacccaaccgtgtgaccaaagtggctgtgaagatgttgaagtcggacgcaacagagaaagacttgtcagacctgatctcagaaatggagatgatgaagatgatcgggaagcataagaatatcatcaacctgctgggggcctgcacgcaggatggtcccttgtatgtcatcgtggagtatgcctccaagggcaacctgcgggagtacctgcaggcccggaggcccccagggctggaatactgctacaaccccagccacaacccagaggagcagctctcctccaaggacctggtgtcctgcgcctaccaggtggcccgaggcatggagtatctggcctccaagaagtgcatacaccgagacctggcagccaggaatgtcctggtgacagaggacaatgtgatgaagatagcagactttggcctcgcacgggacattcaccacatcgactactataaaaagacaaccaacggccgactgcctgtgaagtggatggcacccgaggcattatttgaccggatctacacccaccagagtgatgtgtggtctttcggggtgctcctgtgggagatcttcactctgggcggctccccataccccggtgtgcctgtggaggaacttttcaagctgctgaaggagggtcaccgcatggacaagcccagtaactgcaccaacgagctgtacatgatgatgcgggactgctggcatgcagtgccctcacagagacccaccttcaagcagctggtggaagacctggaccgcatcgtggccttgacctccaaccaggagtacctggacctgtccatgcccctggaccagtactcccccagctttcccgacacccggagctctacgtgctcctcaggggaggattccgtcttctctcatgagccgctgcccgaggagccctgcctgccccgacacccagcccagcttgccaatggcggactcaaacgccgctgactgccacccacacgccctccccagactccaccgtcagctgtaaccctcacccacagcccctgctgggcccaccacctgtccgtccctgtcccctttcctgctggcaggagccggctgcctaccaggggccttcctgtgtggcctgccttcaccccactcagctcacctctccctccacctcctctccacctgctggtgagaggtgcaaagaggcagatctttgctgccagccacttcatcccctcccagatgttggaccaacacccctccctgccacagcatcgcctggagggcagggagtgggagccaatgaacaggcatgcaagtgagagcttcctgagctttctctgtcggtttggtctgttttgccttcacccataagcccctcgcactctggtggcaggtgccttgtcctcagggctacagcagtagggaggtcagtgcttcgtgcctcgattgaaggtgacctctgccccagataggtggtgcagtggcttattaattccgatactagtttgctttgctgaccaaatgcctggtaccagaggatggtgaggcgaaggccaggttgggggcagtgttgtggccctggggccagccccaaactgggggctctgtatatagctatgaagaaaacacaaagtgtataaatctgagtatatatttacatgtctttttaaaagggtcgttaccagagatttacccatcgggtaagatgctcctggtggctgggaggcatcagttgctatatattaaaaacaaaaaagaaaaaaaaggaaaatgtttttaaaaaggtcatatattttttgctacttttgctgttttatttttttaaattatgttctaaactcgtgccgctcgtgccgaattc

SEQ ID NO: 770 - DNA, 3981 bp, Homo sapiens
cctcttgcggccacaggcgcggcgtcctcggcggcgggcggcagctagcgggagccgggacgccggtgcagccgcagcgcgcggaggaacccgggtgtgccgggagctgggcggccacgtccggacgggaccgagacccctcgtagcgcattgcggcgacctcgccttccccggccgcgagcgcgccgctgcttgaaaagccgcggaacccaaggacttttctccggtccgagctcggggcgccccgcaggcgcacggtacccgtgctgcagtcgggcacgccgcggcgccgggggcctccgcagggcgatggagccggtctgcaaggaaagtgaggcgccgccgctgcgttctggaggaggggggcacaaggtctggagaccccgggtggcggacgggagccctccccccgccccgcctccggggcaccagctccggctccattgttcccgcccgggctggaggcgccgagcaccgagcgccgccgggagtcgagcgccggccgcggagctcttgcgaccccgccaggacccgaacagagcccgggggcggcgggccggagccggggacgcgggcacacgcccgctcgcacaagccacggcggactctcccgaggcggaacctccacgccgagcgagggtcagtttgaaaaggaggatcgagctcactgtggagtatccatggagatgtggagccttgtcaccaacctctaactgcagaactgggatgtggagctggaagtgcctcctcttctgggctgtgctggtcacagccacactctgcaccgctaggccgtccccgaccttgcctgaacaagcccagccctggggagcccctgtggaagtggagtccttcctggtccaccccggtgacctgctgcagcttcgctgtcggctgcgggacgatgtgcagagcatcaactggctgcgggacggggtgcagctggcggaaagcaaccgcacccgcatcacaggggaggaggtggaggtgcaggactccgtgcccgcagactccggcctctatgcttgcgtaaccagcagcccctcgggcagtgacaccacctacttctccgtcaatgtttcagatgctctcccctcctcggaggatgatgatgatgatgatgactcctcttcagaggagaaagaaacagataacaccaaaccaaaccgtatgcccgtagctccatattggacatccccagaaaagatggaaaagaaattgcatgcagtgccggctgccaagacagtgaagttcaaatgcccttccagtgggaccccaaaccccacactgcgctggttgaaaaatggcaaagaattcaaacctgaccacagaattggaggctacaaggtccgttatgccacctggagcatcataatggactctgtggtgccctctgacaagggcaactacacctgcattgtggagaatgagtacggcagcatcaaccacacataccagctggatgtcgtggagcggtcccctcaccggcccatcctgcaagcagggttgcccgccaacaaaacagtggccctgggtagcaacgtggagttcatgtgtaaggtgtacagtgacccgcagccgcacatccagtggctaaagcacatcgaggtgaatgggagcaagattggcccagacaacctgccttatgtccagatcttgaagactgctggagttaataccaccgacaaagagatggaggtgcttcacttaagaaatgtctcctttgaggacgcaggggagtatacgtgcttggcgggtaactctatcggactctcccatcactctgcatggttgaccgttctggaagccctggaagagaggccggcagtgatgacctcgcccctgtacctggagatcatcatctattgcacaggggccttcctcatctcctgcatggtggggtcggtcatcgtctacaagatgaagagtggtaccaagaagagtgacttccacagccagatggctgtgcacaagctggccaagagcatccctctgcgcagacaggtaacagtgtctgctgactccagtgcatccatgaactctggggttcttctggttcggccatcacggctctcctccagtgggactcccatgctagcaggggtctctgagtatgagcttcccgaagaccctcgctgggagctgcctcgggacagactggtcttaggcaaacccctgggagagggctgctttgggcaggtggtgttggcagaggctatcgggctggacaaggacaaacccaaccgtgtgaccaaagtggctgtgaagatgttgaagtcggacgcaacagagaaagacttgtcagacctgatctcagaaatggagatgatgaagatgatcgggaagcataagaatatcatcaacctgctgggggcctgcacgcaggatggtcccttgtatgtcatcgtggagtatgcctccaagggcaacctgcgggagtacctgcaggcccggaggcccccagggctggaatactgctacaaccccagccacaacccagaggagcagctctcctccaaggacctggtgtcctgcgcctaccaggtggcccgaggcatggagtatctggcctccaagaagtgcatacaccgagacctggcagccaggaatgtcctggtgacagaggacaatgtgatgaagatagcagactttggcctcgcacgggacattcaccacatcgactactataaaaagacaaccaacggccgactgcctgtgaagtggatggcacccgaggcattatttgaccggatctacacccaccagagtgatgtgtggtctttcggggtgctcctgtgggagatcttcactctgggcggctccccataccccggtgtgcctgtggaggaacttttcaagctgctgaaggagggtcaccgcatggacaagcccagtaactgcaccaacgagctgtacatgatgatgcgggactgctggcatgcagtgccctcacagagacccaccttcaagcagctggtggaagacctggaccgcatcgtggccttgacctccaaccaggagtacctggacctgtccatgcccctggaccagtactcccccagctttcccgacacccggagctctacgtgctcctcaggggaggattccgtcttctctcatgagccgctgcccgaggagccctgcctgccccgacacccagcccagcttgccaatggcggactcaaacgccgctgactgccacccacacgccctccccagactccaccgtcagctgtaaccctcacccacagcccctgctgggcccaccacctgtccgtccctgtcccctttcctgctggcaggagccggctgcctaccaggggccttcctgtgtggcctgccttcaccccactcagctcacctctccctccacctcctctccacctgctggtgagaggtgcaaagaggcagatctttgctgccagccacttcatcccctcccagatgttggaccaacacccctccctgccaccaggcactgcctggagggcagggagtgggagccaatgaacaggcatgcaagtgagagcttcctgagctttctcctgtcggtttggtctgttttgccttcacccataagcccctcgcactctggtggcaggtgccttgtcctcagggctacagcagtagggaggtcagtgcttcgtgcctcgattgaaggtgacctctgccccagataggtggtgccagtggcttattaattccgatactagtttgctttgctgaccaaatgcctggtaccagaggatggtgaggcgaaggccaggttgggggcagtgttgtggccctggggcccagccccaaactgggggctctgtatatagctatgaagaaaacacaaagtgtataaatctgagtatatatttacatgtctttttaaaagggtcgttaccagagatttacccatcgggtaagatgctcctggtggctgggaggcatcagttgctatatattaaaaacaaaaaagaaaaaaaaaaaaaa

SEQ ID NO: 771 - DNA, 490 bp, Homo sapiens
ttccttttcctccctgtcgccaccgaggtcgcacgcgtgagacttctccgccgcctccgccgcagacgccgccgcgatgcgctacgtcgcctcctacctgctggctgccctagggggcaactcctcccccagcgccaaggacatcaagaagatcttggacagcgtgggtatcgaggcggacgacgaccggctcaacaaggttatcagtgagctgaatggaaaaaacattgaagacgtcattgcccagggtattggcaagcttgccagtgtacctgctggtggggctgtagccgtctctgctgccccaggctctgcagcccctgctgctggttctgcccctgctgcagcagaggagaagaaagatgagaagaaggaggagtctgaagagtcagatgatgacatgggatttggcctttttgattaaattcctgctcccctgcaaataaagcctttttacacatctaaaaaaaaaaaaaaaaaaaaaaaaaaa

SEQ ID NO: 772 - DNA, 615 bp, Homo sapiens; identical to SEQ ID NO: 161

SEQ ID NO: 773 - DNA, 2589 bp, Homo sapiens; identical to SEQ ID NO: 60

SEQ ID NO: 774 - DNA, 1229 bp, Homo sapiens; identical to SEQ ID NO: 61

SEQ ID NO: 775 - DNA, 2512 bp, Homo sapiens; identical to SEQ ID NO: 690

SEQ ID NO: 776 - DNA, 1213 bp, Homo sapiens
ggcagccgaggagaccccgcgcagtgctgccaacgccccggtggagaagctgaggtcatcatcagatttgaaatatttaaagtggatacaaaactatttcagcaatgcagacaattaagtgtgttgttgtgggcgatggtgctgttggtaaaacatgtctcctgatatcctacacaacaaacaaatttccatcggaatatgtaccgactgtttttgacaactatgcagtcacagttatgattggtggagaaccatatactcttggactttttgatactgcagggcaagaggattatgacagattacgaccgctgagttatccacaaacagatgtatttctagtctgtttttcagtggtctctccatcttcatttgaaaacgtgaaagaaaagtgggtgcctgagataactcaccactgtccaaagactcctttcttgcttgttgggactcaaattgatctcagagatgacccctctactattgagaaacttgccaagaacaaacagaagcctatcactccagagactgctgaaaagctggcccgtgacctgaaggctgtcaagtatgtggagtgttctgcacttacacagaaaggcctaaagaatgtatttgacgaagcaatattggctgccctggagcctccagaaccgaagaagagccgcaggtgtgtgctgctatgaacatctctccagagccctttctgcacagctggtgtcggcatcatactaaaagcaatgtttaaatcaaactaaagattaaaaattaaaattcgtttttgcaataatgacaaatgccctgcacctacccacatgcactcgtgtgagacaaggcccataggtatggccccccccttccccctcccagtactagttaattttgagtaattgtattgtcagaaaagtgattagtactatttttttttgttgtttcaaaaaaaaaatttttgtgtgtgtgtgttttttttttttttttttttgttgtttaaaagcaaggcatgcttgtggatgactctgtaacagactaattggaattgttgaagctgctccctggttccactctggagagtaatctgggacatcttagtgttttgttttgtttttttccctcctcttttttttgggggggagtgtgtgtggggtttgttttttagtcttgtttttttaattcattaaccagtggttagcccttaaggggaggaggacggattgattcc

SEQ ID NO: 777 - DNA, 2930 bp, Homo sapiens; identical to SEQ ID NO: 167

SEQ ID NO: 778 - DNA, 1400 bp, Homo sapiens; identical to SEQ ID NO: 168

SEQ ID NO: 779 - DNA, 137908 bp, Homo sapiens
gatctacagagagcggaaacgagtctgggaaaggaagaaagaggtgtgcttgtttaggtctgggcttggctacagagcaggaaaaaaaggaagaacagtgactttggggaagttgtagccagctgaaatcaaagttttaggaggaggcagcgaatgcaatttgtagcaactgattttgttttaataaaggaataaagatgtttgggaggacaggtgcttcaagtactaatcatccaagaagaaaagcagtttgaacttaattgactatatctgctatgattgtgcactattcgattttagcccaatcagtgattttctaaaagcatcccatctccttttagtcaaaactggatttgtcactgacttgtatgttggcatggaggtcctaatagctgccacctgcatttcctgttcatcaatgaaggtattgaaaattacaaaggaatgagagttgggggaaaggaagatgttcatttcgtaggggtgagggatgtatttacatgtgggtttttaagtgtacagtactagaaggaaaagccaaaagtttccatgcattctagagaagcatatggcattgtaattctcacacattgctatgcaagacaatctcctatggaattctgtggctcttacctttggtgtacatacgacgcagagattctgagttattatgtgtgaattgggctccaggttctcagccagggattctcattgttggttgtaaattggaatcacctggagagcttaaaaatattggcacctaggttctgttcccagaggtttttacttaatttttctgggggtgagaactgagcatggggattttctaactctccccaagtgattctaatgttcagacaagtctgggactctctagtttagcccattgcttaattacttgggtggattaaactagttgttcttaaagtgttgtcctggaaccagcagcttcaacatcaacaggacacttattagaatgcaaattcttgggcccctgcccatatttactgaaactcttggggtggctcagaaacctgtgttttaacaaaccctctggatgattctgatgcatgctataaagttgacagccactagattaaacggttgttcctgaccctttctaaagtacatctgtgggagttgctaaaaacaagagatgtcttcaagagctgatgaaaactggcctgcaaaaggacttttacagaaatacctataataataataatagaagctagagtagagaaaggggaaaggggatgataatttgctgcaaaacctgggcaagttcagggggaacatgtcttcatgagttagggagtttgttgcatgggctagtaataccctggcagtacctgcaggcaaactcctacttattcttcaatacccttttaaaatgtcagcctcctctgtgaagctttctctgagctgtggtgtaaactacttcatccttgtgtttacttagtgctttctagtttcctcgattagctcttggcccactgtactgtagctctctatatatgtctgtctcccactaaactgcgtgatccttcaaagcaagaacactgtcttattcatccttagctctccagtgtctaataaactatctggtacatactaaatgctcttgaattgtttgcttagaggggggatcagtaatggccagctttcttgtatcaagaaccttcagctgggcgcagtggctcacacctgtaatcccagcactttgggagaccgaggtgggtggatcatttaagttcgggagttcaagaccagcctggccaacatgctgaaaccccatctctactaacatggtgacgcgtgcctgtaatcccagctactctggaggctgaggcgggagaatcacttgaacccaggaaggcggaggttgcagtgaactgagatcgtgccccgcactccagcctgggcaacagagcaagattccgtctcaaaaaaaaaaccttcaaaagatgggtttacctttgtgaattaatcgtagtcctgagttcaactctgactagaagactagagacattgattctctcaggccatcatgacttgatatctcttagtggtggccttataccacaaagctctcagagaaatatacaattattagcaacttattattttaccatgataattggcaggtgccaagactactattgtcattttttcctcatatttcctctcattgtagatgcaccttcatgggaaatctaattaaaatcaatagggatacagctgccacagggtaaaagtatttgagttcttgggccccacagcttgcctctctcatccaggcactggcatcttctggttcattgtacttccctaattctataatgtactctcttcattccacatctattcacaaacattcttcaaacaagataagcacttagcaaattacaattacctttccattgcactttcccaaggttatactcaggtcaaaatgaatggatgtatgtgtattccccaagtctttagagaaacagatttacaggcaatcctttggtttaattttctagatacttaatcacatattcgttatatgtgggtttttactggcttaactctcagaggacaaccatataaccttatttttaagtttttggaggtaggacgacacttcactgtcacctcagttactgccaatattaatcatttctaaatgttatagaaactttgaaatatatgtgtcattctctaaagtggaattattaagacccagaatgtaaaccagaagaaactggatttttgccgtctgtgccaagccatgattttaatatgtatgtgctgaatggatttttctatttttttctacaggcattgtatctgatagccactaatggaactccagagctccagaatcctgagagactgtcagctgtattccgtgactttttaaatcgctgtcttgagatggatgtggataggcgaggatctgccaaggagcttttgcaggtgaaaataaaataggacaattacaaagagaggcattatactcagcttttccatctcaatgtgtgacagagagctctgtcaagagatgtctagagttaggctattaccattttattttagaccacaggcacataactataggcacgcatctaatacatgattgattgacgtgttgcctttcttctgagaagttggcagtgtaatctgtaaatctcttttgttcttcctggagtcttattttgcaaggaaaaaaaaaaaagcaatgtgaccctctggtgttggtgttttgttctaaactttacttgtgcccctggatgttgtatgcaggtgctcttggccggaggtaattctctacataactatgcaattatttccatggcatttgctactctaatgctttgctggtcaaagcccctttgcttgtgatgccaattggcaggcacctgcttgcctgggtgagtaccatccagtggtgagtgcctctgtaaccatttgtccttttcacggctcccagggattagtatacatgatgagaaataatacttactatgtaccaaattctttcaataaattatttcatttttataacaactttatagggtaggcattattatcccattttatagatgtaaaagttgagactcacagctcttgaagggcagagctgggatatgagccctgaattgtctgactttccaccacacgtcacacacaaaccaatttagataaaaatatgtctgtatttgataaagcagtacgtgcccaggattatacacatagcttcactgctggggagtgtttctcagggacatgtatgaagacatttaacatctaagaacaatgactgctatttttctttgtgattttgaacacataagccaattaaacagaaggtgcaacacttggttatacagcgcattaaccacagattgtctgttctagcctactccctgaaagaaaaacctgttcctgttgcttctgaactccttccagagacagagctgcacccaggcaaaaactatcccaccctaactcagatcatacctggaataaacctatttggagaaactgaagagactacatcttttcttttctgctacctgcaagcatttcacaggttatcatagggccctaaaatgtcaaatctggaatggccctttgttaatcctctaattaatccagcctcaaattacagatgaaaagacaacttttgagtacatcacttttatattttttcacccctcccaccactccacatacacattctgatacacattcctcttatatcttcttgtaaggataattgaaggtgtaggttatcttcaattggctatccagataaatgtggctatccagctaaatagatcattaaatcaattatctagttaattcattccccaacaatacttttatatgaaccagtcagataactgatacaaaattgtattttgagtctaaattgaatagtttattgcgtcttttcattttatatatgtaagcaatagcctgtgtttctctttgagtccatgcaactccattctctgactctagcctattattgccattttcaagattagaaaggggagagatgcatgacattcaccccactggaaggctggagaaaagacacaggtcttcaatatttgtgtgtctttctgtatgacctaagacagttctgtccatcaattgatatttattgagcaacttccatttgtaaagcataagtgcagtgggtgatacaaacctattaaaaggcatgattcctccatttaagaagttcacaaccttcttaggtacatgaaaatataatgcaaagctgtttacagactcattcaacccaaagagctgttcaaatagtaaatgatatggttgattagagaaatacttctgttagctaggggtgatcagaaaatgtcttcaaacaggaaagaggtcttctgggccttaaagaagtgatcaggtttagttaagttgaagaaaataagggaagggatttcaaatggaaggaagtgttagggtataaccaaagacatatgggcaaggtctacaggaacagaacctagaaagtgtagctgaaataaagagttcaagtaaagaagctgcaggggataatcctatggtgggccttgaacaccaggcttaagagttggggctgtaggcagtggggaaacactgaagatgtctgagggacaagcatgatgacaactttgtttatgaagattaatctggtagtatgtggtaagaattagcaacaggaaaaaatggagacagggagaccaagggggagttattataatttgggattaagatgattaggattgaattagaaaaagcaagagatggccagacgtgattgctatgattgctatgcctgtaatcccaacactttgtgaggccgaggcaggcggatcacctgaggtcaggtgtttgagaccagcctggccaacatggtgaaatgctgcctctactaaaaatacaaaaattagccaggcatggtggcatgcgcctgtgatcctagctactcaggagactgaggcaagagaatcacttgaacctgggaggcggaagttgcagtgagctgagattgtgccactgcactccagcctgggcaacagagcaagagtccatctcaaataataataataataataataataataataataataataataataagcaagagataaatgtaagagacgttgagaagagagtacccggtagcttattgcatttagaacataaagaagaggaagacaaaagtgacttcaggctatcaagtcaatggtagcattcagcaagaggacaagtgatggaagacaatataatagctaacatttcttgaccctatgtaacttacaagggattgccacttacctcatttaaccattttaataaacagagatgaggatttaacctaagtgctctgactccaaagcccctgtagcttacattacacaagattgccctgcttgtgagactgtaacataactttttaaatgttgaatttaaggtgacagaagaaaatcccgtaggaaatatccagcaggaaaactaggaccagagttcaggaaagagatcaggtcatacactatggatttaggagtcatctccataaagctgatggtgggttgaaaccatgaaagagaatgacatctgtaagaaattaaattaaaaaaagaagatgatgacagccaagttcttatgagtgggaggtaggaggaggaagtgaaaccagggaagaaaatggagctggaatattcagtgcacatgcgcatggaagagacccaatatggtagaatgtcacaggcttctgaggcaaaaaaaataaattaaaaaaattcaaagaaggaagggatattcacttttattaagtactgcagaggggccaaaagagaaatggtagaggcacagccgttgggtttagcagttagtaagccattggtttcaggacagagttctctagtggttaactaaatatactttttccaagcatgacagcttctctagataaatatatcagtttaggaaaatcagagagtcagactgttgcaaacacagtgaggttttacaagatccctcagagtttctcactctgctagtcagcttccagaggatttcatgacaatgaagtacaaaaacatctgaaggacaaaagctggcaccgtttttaattaaatgatatttaattgggtgttcaaaatatatcttaattcaaaagggctgcttgaaaatgtaaagtaatatacttgttggaggaaagaattccaataattcctctttttccttccttttgcagcatccatttttaaaattagccaagcctctctccagcctgactcctctgattatcgctgcaaaggaagcaattaagaacagcagccgctaagactgcaagccttacacctcaccatctccctcatgagtaagactgaaataaaactctgctgcaggaaagatggaagaaaagacagtcaaatggggtgggggttctttacctttcaaatgaatagaaacttcttataagcctttttcctactccctcagattatgtaatttatttgtaagcctgaatcgcagcccaaacagggcagcaatgttgaagtgaccataaagtggtcacttccaccgtgaagcgaaagagccagtagtgaatcccctcattttgtgcattcactttgaagaaaaaggtttctcaaagatgcacactccctcttcatagtgttgtgtttgtttttaagttagagagtagtccctcttgcattcaaacctccttcaaaactccttacccaatgtgatgtttttcacttgcattgtcattagatgtccagaaaaaaaaaagatgtcaaaatgtttttctaaaaaaagaaagcaaaaaaagcaaggcaaaaaaaaaaaaaaaaacaaacaaaaacaaaaacaaaacaaaaacaagcaaacaaaaaataccagagcaagtactgtgtgaacatgtggaagtccatgccctaatagagttgcaattttttattcttcttctatagtggtggcttggtttgtgtacctatttttctgcatttgtattggaaaaggtttcttttaagacattttccaaaagtggagaggaatatgtgtgttcaggaagggctttcaaaaaactgtatatctaaataaagctcaaacggtgaaatcctgtcacattttcacaatgatgcttaaaagataattgagtaaaccaggttgttaatctccttaatacctgaaagaggacacactgaaactgaaactgtgacatcctgctaggtgagttcaggttctgaacctaggaaatcctcataggagaaaccacatttaaacaaagatgggactttctctgagagccaaaaccagataaatgtagaatactgaaatccttgttggacattaagtaaacaaagataatgatacctaaattaatcctctcttgtgcttatgaaacatatgcactgtaaaataggcataccaggaggaaatagatacattaatcatcatttacttatgatacaaattatttattttgacaatttataacgtttaaaaaagttttttaaagatctagagaaaggtgatatagtaaacattcaactctgtaagaaatgggaggtcagtgaaggctacatcccaatcaatatttggctctaagtacctcttcccatttttcctatgtatcacctatttctgtttcggaatatggtgtgttcatgcttagttctttgggcttttgaatatcaaaagcatattcataaatgtcttgaaattctctccagtggaaaataattttaacttacaatcatatcccaagaaatgtcagtccgacagaattccttatatgacttggggaaaataacaaaatttgactactatttcaccatatatctatttattaaaaaattcaacagttggcacttcctgaatcttctgagagtagaaaaatatctgcggagtgtctgtgtagaaaaggatatgcctctcttttgagtgtattgacaattttgtaaattacagaaagttgtttctctaagcctttgaaaaactaacaatttgtgttatagaaggcttcttaatttgcagtataaaagaatctaaacagaacttatgtacattcagccagaaggggaaagagatcagttacataggcctctctccttctttgccaaggtacatccatccatctaaccatccatatatccacatcttaaaatgaaagcactttctttagagtttcagcaaactatatagtgtacgtgtttatgttcaggagatgaccccactggtgtatttcctattttccctattgttttctttgactgtaaaagttgggagaggcttgacctcctccccttgaaaatgtccacagtgggataaaacaacaaatgtgaaaagaaaatgaaacggtaatattaatttgaagcatactatgttatactttgcaaaaacgaatctgggcctgtaatttttaatgccacactgctctaatgagagagagaggccttaattttgatttcatttaaaaataagtactttaaaaaatttttcactcatagtgccgggaaattcaatgaaatcctgggatgcaaataaaaatcagtacattagtgactgtgtcctgccagtggagagagcccaatacctggttaggaagccctattcattagttagcatcccttacatgttgagaaggccttttttttgttgttattttggagaccttggagcagtgacccttcagatcactgtaggcagagaaatggcttctctcttatgctttcagttcagcatattaacaatgaggagccaggtacttctttactaccactttgtaccaagatttgataataatatatcccaggaggcattacttttataaatttgtattcatgtaaattttcaaatgagaacagcttctaaagccccttccctgtattggagagttatgtatatttctaataagtattagaaagaagctgtttctcatgccacagtgatgctgaaggattcacatttggtacaatcgagtaacttgaacgccagattgttaacagtttattctctttccctggatttttaagctcatcttgacacaggtgagtctatccaaatctttgatgttgctagtgtgccctgagataacgagggcacatctttcaatgttgattccaaaatgtcctgagttaggaatagggcagtgggaaagtcagggaagggtgagaagcacagtagagattatttatttaaaaaaggaaagaacgttaatgttgttagcaaggatccagtgcgttgtcataatcccatgaggattttcagatgacacaatcccctcaaatcagtcaccatgttgggtaatgacttcgttcttgctgatctcgtgtgtgtgtcattgtaaatatttgtgtgtccatgttccattttggctactggatggccaagccatgtaagaagatttaactcaagtatttattctttatgttattcagatttctttcaggcttgtgaactgcaccccaatgtttgagtttaaccacctgatccttacatctatccctccccggtgaagcacattccattgctaaaagaaaaagaaacacgaaattgcttcctgttgtctgtataactgttttgatagtttgagatatttgtctataaatgatatttctcagctcaaagatcgtgtaaataattatattcctttgctcaatgggtttatttctaatgaggctgccagttctgagagattctataatatcacttttaaataacataaacagggattacaactatgtaaaaagaaatgcatatggacaaagactgggaacacagataattgaaatcagttgtgttagggtggtggaattatgtgaatttttttttctttttaaaattttatttgatattgttataatattgctttacaataaataaacagcagaaagggaactatagacacatagaaaagatgccagaagcagatgccttctggccagagcgcagagcatgcagggcagagatatttgctagttacaattattccataggctttatgcttgcctgggtgctgaggttggcacacgctcgggtatggcacacgctttcttaggagactattatctataagttaaagctagggagatgtcactattagaactccaaacacactcttctgctttaaaacaggttgtctgccctctgctttggtatggcattcgggtgtctgttttgtggttgctttagattggaggggtgaccattttattagcccccttgataacatctgttgcagatattgcctttctggaacgttttaacagactctcaggttgaattttggaggactagaaggataaaatccccagctcccaccattttcttgtccaacaggatattactgtatatcattcaggtaggattcttcttttaataaccaatagggcaagtcccactaatttcaatagaagttatgacttgcaattaaaagctgactttgaaatcattaaacaaatatgtaggactgtctctgcctgttggcattcagttatagttctgttaattttggcttgggatggtctccatgtgcttttttctgcctatttataggttgtttgcagtagttgtgatttttaaagagcaagggagaccatctaaccaaaggataacttccttctaactcaccaaagaaattttaggtgagaactttaataatgaggtagtcacctcagatatgctgcttagtttcactaaaagcagaccctatacctagagaagtcactggctttttattggtcattctcaatacagaaatacttaggggagtcttaaccctgccatccccggttgaatctcttggtctttatctaagctacttgcagttaatattcagttaagcaaaggtatggccagtagtgcaagtatctcccagtctctgagctctgaacaagaggactgaaattcagcatttgtaaactgacagtttgatgggcctgggatttgaagtgaactcagcacacaattctgaacgtgtatttgcatgtggactgggaaggaaataaatgggaacttggaaataatggaatatttctcctatgaaagaatttttcgtagaagatttgtttttgatataatctttctgttggttagcttttagtgttttcattccttttctgatccacactcctttaagtgaccaaatgaatataacccaacatgcattgggaatgtgtttaatattaaacaatgtctaactgaatctgcaaatgcgggaactgagatatcacctccatgtgcacacctgtgtgtacgagtattctatacaacttgtagcatttactgccacttaattgggttgaacttgcaagataaacttttggaaactgcttagtgccatcggagtctcctttagaagctgccatcaggcaaatgctatcccataataccagcagtaagcctggcaacatgttcaacagatttagtacccaagaggaaatcaacagcgatagtagagaatgagtcagatgtagtgggataaatactagcctaggaagaaggagccccggagtctaatatgagctttattactaaattgctatgtgacgctaggcaagtcacttaacctctccatggctgtttcctcatctgtaaaataagtgtattggactagatgatccttagggtctttccaaaagtctaacattctatggcattataggttgccttgcaaattcagcctgctatagtgatggcaaatatcacgtttaagcctgagtctcttatgttgcagttaaataaaagaactatgtaagatgatttttaaaattcaagcaaatgggccgggtgcggtggctcatacctgtaatcccagcactttgggaggccaaggcaggcggatcacctgaggtcaggagttcgagaccagcctgaccaacatagagaaaccccatctctactaaaaatacaaaattagccgggtgtggtggcgggcgcctgtaatcccagctacttgggaggctgaggtgggagaatcgcttgaacccaggaggcggaggttgtggtgagctgagatcatgccattgcactccagcctcggcaacaagagtgaaacttcgtctccaaaaaaaaaaactcaagcaaatgaagttcataataataggggatgttgataaaacttgtggcagccttccaattcatttacagttgtttcgttttgtttttgttttaatgtccattttctgttgactgttcccagttttcattttccatacagtctgtatgtaaagtctggttttcattaagctgtggccagtatttgccactacaacagaaacacactgtcacacttgctagaatataactgtacttgagcttctcctttcctgtgaagtagtgctgggctttctagagtttaattctcaagtggcacaagatagcagagcccatgcattttaatggctgagactgctaagagtgaacctaaacacttacaagttgcagagagaaatgaaaaagtaattacatgctattagcattgagaaatgttgacaaattaatttgttgggaaccaaagatagcatttctgatgacaactcccacagtgattggccagttgtatgatgagtacactgctggaaagagggtaaactgggagttagtggatggtcccaatgccctgcctacagcagagtgccaaccagccctgagtgcaaaattcaagttcaatgtgtgtgcttgtgtgtggtgtgctttatggacccgcaaataccatattcattattgatgataagatcttcacagaatcctgtagctactaatgcattgagtttttaatctcagtacatcagccaggaggagccagatcacagggtagtgatgtctactgggattatactcataacatctacacaaaacaagttgagaaggatccacgttttcattgtttatcagaattgtatctcatttggctgagcattacttttgtcagaatgtgttatctgtaaaccatgtgtagtgaaattcttctgtaactttggattaaaggtatttatggtctttttgtttgtttgatttttaagtaagttatttcttttgtagacctgctgatggtatggttccatccttctgacctcagcatccaatctttttaaggatttttgttttcaatattgttattttaaattgtggttgaagcaatagaaaattgaaatatggattgtgcatgactgtgtcttgagtgtaaaaatattgcagtttgaaacttggacctaaagtattgcaaataaaaatgacaaacatcaatgagctattgcttctgtcttctgtcaccttcccatccaccccccttggcattgaccattttacctacttcacaggttagagggtatcaccatctcataggtctggagtcagggaaatgcccagccttgtcagccatacaggaaatgctctgcaaattctgctactaaataactcggacccagagtctccatctgatgtttacatggaatagctcagagaggtgaatgtgtatactcaatgcaggtcagaagccttgcagatcacaaatgtagatgaaggggaactaccaaaagaaatcacgtgtagtaaataatttgtttttgatcatctttccacttggaaaattctgaacacgcaaaaccatctgcacaatgtttagttttgtcttatatctgataccaaagtccagaggtcacaggaggcatttcaaccaacattactgaaaaccttcattcattaatttgctcacacatttgaaaagcatttattgagctgctgctacatgtcagacactgtagatattcaaaaaatcacctgtaaatgtgactaaatgacagtaaagcttgttaaaagctgctagatgcacctgttggagtcaggtttgtcagaggctctcttgagtcctcaagactcaaggacaccagcaatttggtaaactggaggtttgttccactagtattacttgtacagtgggcatagtactccttctagagaacgtgtatataattttgtacctttgtgtaagtgcatacacactggtactatattccttacaaatggattatgtatcttaccaaatgttatttggttgttttctagttcactgtacttacatgcaagctttaattttctcacttaatctctccatgttgaaagccaaaaagacattttctgtaaatatgagcgggcaagtgaatgagaattccagcaactaggatttagccaagttctctactgcccatgtgcataattactgcactgcctctcttactaacaagctcctgctaacaagcctcacacccttccagcctttcttgccaggttactccaactatttttctattcctattaaatgaaacagaaatactgtctatgagttagcaaattaccaatatcttccatcacaaaataaaatttgaaggcattttcctttgtcacaatgacttggaggagcagggcccaaacaatgataaatatattattccacagctcaaccttataagcatgattgctggaactctagccttatccaagttccttacctcctactgaagtgaggaggggctaatacctgaagtgccccacagattttagttgttctccacatcccatgaggtctttgcccccaggcacttgggtggcatctgctggcttcccacacacctgtgtcaagcaccactactaccactaccctctgctaatcctgtaccagtgtcactgtccagctgctcctgtgcttgccattctacttacctatatctgcaatatacacagcagtccctgatgctgacagatctctgggatgattcaaccactttgcagttttacagctgactactttttatttgttttccatacctgatggcagaaacccttcccatggaatcaaatcatttcactacatctttggacccattttgatgttgatgttctttttcagtttttggcacctcactgaaccagggagcaagtttggtcttggttttttcccctctcccttactggggcttgtcaggtcaacttttgcatattacaggcccgctgcctaccatagaggttaatctgaagcctttgctatagctattgctttatacacatttatacatgttctctcaagcagccaaccttggagtaaaaaggaaattggcaatgtggccctcttatacgtgtactttagtattttacctagagaacccttgtcctatttcctagacatatatatttctgcaaagtaagaagcaaggctatattaccattgagggtaaacagataaaaggtacacaggatctctcttcattcttacaattacatgtgatatacaattatcttaacaatatttgcaataagaaaagcaatggactgcatggcatctttgtttatgacatttcagaggtcatggtaatgatataggctgggtatcatggcccagcccacttctatctccaactacctatactttggtatcaagaagttcctcacaaaattaattccacctgtcaccagtcccacccaccttagatagtaggacatcccagtttctcctcagccacttgtgatttctccctggggatgcagggaatgcaaatatcattgtttatgagttcctccctgtggacatgaattgactggcttctcagcctacagtattgcaggagaataaaattcataatgagaaacatcttttaattttataatatgtaaagccaaattgctttgctttacaaaatgggagggctatgccatgttctaatgttgtaaattaagactctacattgtatactgaaaccctgcagtaagaataaataaatagccccactaggctttccacattttcattctaaactctcttgaacagacattagcaaatggagttaaaattccttttatatttaaatatatgtagctgacataattcagatattttaaaattatttaaataagatagttactcctctagaattcaagtagaaaatggggattatcaaactattcaccataatgaagatcttaatccctgctgctattggtccattaccaccttcagcagtgatttttgttttgattttgcaagcattgtgcttggtaagctgtttttcactttactcagaagtgcatatattataatctgctttcaggatatttctatcataaggtttgactgtagaaaagacaataatgttcccagttggtaatttagagtcttctaactcctctggataaacattatctggattccatgtgatctcatcaatcttaccaacaccaacacatctagcatcaaaatgatataaataattcattgtatgaaggatcatattaccaaatcctgaatgataaaggttttatcccctacactgagagaaaatactaaaacgttcatgcaagaagcagcatttatgaacatttcaaatccatgcaggctaactctccaatggcagagttgcatggatgccacttggactgatctgttaaccaatgatgtaggcatgtggattaatatcagaatagcctatactatcaggataagtatctgtaatctagaatattcctttcatcagtgctcatatgaggagcaaatgtatcaattccaggatcaatgaaacccattttccttagctccatggtgagcttaactcattgactgtataattttgagcactgtgaacaccaaacttagcccctcctttaaatggtatataaactaaagcactttgtatgttattaaagaaacgaaagccttaatatcattttcactaacatctgtaccataaggggtgcagtgttagttgtgctgggccaatgtgccctctatgaccatctaggagtcactgttcctctgatgggaaaactaaggcccagcacatagttgtaggcttaatgatttgtaaaatgtcgtgtccccaattgagttcacctcaccttctcagatcttcagattttccaccagcttttctccaaccatcatggcatcacagttgaagaagctacccaccccaccctgtaataaatgatttccaatcatattgtccttcatcattgtaatgatgccttgtaacagatgaggtggttcccactgctgcagaagcaaggtcaagtacaaatttggctccccagcctctaagtgagaattaaaggaattctggaggggtacttactttgctggcaaacatatggatggtggcctggtgacttttctttaatttcctgttgactagagtatacactgtggcccactgtgatagggtgactcatttttcttcctgcccataaacagggcaaccattttggacttcccagggaggccctcaattattcagtggaactcagcacctctccatgcagctcctgtcatcatactctaacaatgtaatagtgtttattccattcgaggttgttgcaaaatgccttggaggccaacctgtatgtttccagtagtttccacattggtttagctacatattttagccgcttcctaaatctctacacctcttcttcctccctcatagaggaagtctctggtaaatggagtttcccaccaaaaataaaattaagtgagtaaaattatcatcccctgtagggtggtagcccagtaccaaaaatgctcaatcctgttcctctaccacctgttttgcttttgcttcaatttgactcaatcacatgctgtcaagtcaatggaatcactgaaattatagatccctttaggctaatatgggctaagagtttagatttcagagttagaactgcattttatgtctctctaatcatgagtttcccccattttaacaagagtgtaaaaatacatcagaggttgtgaagaataaaaagttaacatatcataatgcttatcctgctatacagtagatactccataaatggtagccattattattattcaccttttaaaaagtcttggtcgattggaacactttcaatagtaaccactgcccggagtgaattttggccagcaattcaaatgcagacaagtggctcttccacagtagtatacccattgttagagaccttctggtcctaagcaggacaagcttaggtgggccctggttggtgcaatgtgtggacatcattagtatgcaccccagttttctccatctatatccaacggcaagaaatctttgctcactaacaccagtctcttgcttgtggggatagcatccagctgtgctttctgtattggctagggcttgtcctatttaaagcaagcccatgcctcacatttgtgtgtcaagccctcatccatcttaggcagaaatagcccgttctttattagttctcaagtatttttccctcttatattgcccaaaccattgtgtaatgcttttaaaaccataagacaatactcttgggaggaaaatccagctatttccatttatttttgcaaaagacattatggcatccatataaaacctgattgacccataattgaattgtataattagataaggcaattttattgtatttatatttcaatgaagctgaaacgtaaaagcaatatgagtgttgtgtgtgcgattgtatatgtacaatttgaccattcttgccacttttactgcaaccaatctgattcaagccatattcacctatgctttgatttttgcaattgcttctacacttgcacacctaactgtaatctcagcacagcattcaaaataaatcagaactctccaatggttccatacccctctcagagtaaagacaaagtccttgtaatgacatcatacatggccctccactgtgtgtaccacgctcttaccttctcacctcattcccttctattcttcccctcattcattctgctcaaggtagaatgcttctttgctattccacaaacatttcaggcatgtgtttacctcagagcctctataggggctgttccttctgatcaaacacccttctctcagatatccacatcttcacctttcacctcaagtctatattcaagtttttctttttcaacgagtgctaccctgatcaccccgtgtaaactgaacttctctgactggaactcctgatctgcattccctggtcctttttctcataacatctctaaacttctttcatactttattgttaatttatttgttatgtgtattgtttgactccttcccgttcaatgttacctctaccagagcaggcatttttttcctttttaattccatgaaggcatccccaggtacacagtagtcattcaataaaccttagttgactgagtgaatgttgactgttcctttcttcttgaaactctgttttcttttggttctgtgaccaatctcttctgatcatttccctacctttctggttgtcactactctagttcctttttatattcctgtttctagccatcccttacatgtggatgtcccccaggactctttcctgctctattttgttcacacccatgtctctagcccccatctgcatcataacttccaaattaatatctcaagcccatatatatttcctctgagttctagatgcttattataaatccacctatctactcaaaatctccactaatgtgtttcaaaggcacttgatactcaagttgtcccaaactgaatgtgttcttttatatttgtcatatcagagcctctcctcatattctctcttttctcaccactcaaatcagaaatctaagcatcatccttgaatttcccctcatcttatttacccgtaccatttcctcagttaccaagttcttttgattattcccattaaacatctcttaaactatcccttgctctttacccccattactcctggggaatattgcagtaatccaggaaaataaataatgaagacctaaaagaattggtcacttagcttctacttttcccttctaatttacaattctgctagagtgtgtgttctaaaaagcaaatctgactaggtcatgctctttctcacatcctttctgtaaactctctggccttatcagggtgtgcctctggctcttcagtgcatcccctcatgtggatcctctgctcaagctcaagagcttgtctaatgctttatgaatataaaacatgacccctgcttacagatccatagagagatatagaaaccacctatgaaaatcacatcaaaaaatcaaaatcgatgatctgtaagccagtagggagtgaaaaaagttagtgaagaatattggctgtagtttgtgactgcaaaatcttcctgtgtgataatcctatataaaagcacataaacccaatgatgaagctgagaaatcacaaacagatgaggagaaggaggaggaggtatttttgcactgcccatcatgcagaataatcccacaatgctccccatcccgtggagcttgaatttgaactttcagttgttgtaggtcaatctccatcctggaaggtaagctaactcttcctcaacttgctcaggaaggcacagtccttggtaaataatctgaattggtttgatatatttagcattcttggaaatgaccatataatggtctagagctagacacacaaagatctattattttacagtaaaatgagttatagtcattgagattgtcactgagagctacatctcaaatggtttagtaggagagaagatctgcactgaaataaaaagtatgagttttttggtctggatagatgtcttgacatggaacaaaaggaaatgcccttccctgagtagagctcctctggagagatgaactgtgccagggcgcaagtcagcttggataagcactctggtacagactatggactttccttgtaaccctcaacatctggaaggagcatctgggaacaactcaacagctactagggttcaaagaaagataagacccctctgccagatctgggcagaggtttgaacagatgtttttatattgacagtggtctcagagtatgggaatagtatctggagtaaaaccaaccttgattcaaatcctacctctgccacctaaaagccctgtgagttcaatctaagttgttaacattcataggctttagcttcctcatctgcaaactggaattgttatacctatgtaaaaggttgttgcaaagattgagtgggactatgtaatggagaaatgcaagttacaaggcttggcagataatattctcttgataaatgagttttcatcttcccttacccagactttgactgtatgaagagtgagcctgcaaaaccaagaatgctcaagatcaaaactgccccttttcgaactgacccagttctcacagcaaggtctttatttctgtctttaaaataccatctagaaacaacataagatggagatgtgacacttgttaagaaggaggccttaaaaagggactagtacattattttgtaaatgaacaatttttgttttactcttatctaaaaagtgatacacaccctatgttccttttaatgttgataagttaaatgccctgtaatattgttaagatggcaatattccccaaattaatatacagattcaattcaatgcctatcaaaatcctagctggcttctttgcagaaattgaaaaaatttgacaagctgacccaaaataacaaaaattattcaaagataaggaaacagttggaggtctcacactttctaatttcaaaatttactacagagccatagcaatcaaaacagcatggtactatcataggatagacatagataatagaatataattgaaaatccagaaataaatccacacatttgtggtccattggttttcaacaagagtgccaacactattcaatgggtaaagaatggtcttttcaaacaagtgaaataaaccatttgcacatggatatccacatgcaaaaaaaaaaaaaaaaaacaaatttggattcttgcagtacatcatatacaaaaattaactcaaaatggattaaagtccttaacataaaagctaaaacaacaaatctcttagaacacataggcataaatctttgtgacatcggattaagcaatgatttaaacagtggattaagcaatgatgtaagctgtcacaccaaaaccacaagcagcaaaagaacaaacagataaattgggcatcatcaaaattaaaaatgtttgtgcatgaaaggacaaatcaagaaatagaaggaacaacccagaaaatggcagataatatttgccaagcatatctgttaaatggcttagatccagaatatatatataaagtctacaactcaataaaaaagacaacccatttttaacatgggcaaaggatctgaatacatatttttctgagtaagatgtacaaatttctaataagggcataaatagatgctcaacatcattagccatcagagaaacacaaagcaaaaacacaatgttatatattcatcctgcatacccataactttatacctgttgaccaacatttcaccatttccccgacctccccacccctggtagccgccattctactgtttctatgtgtttgacttgtttagattccacatataagtgagatcatgcagtattttcctttctgtttccagtgtatttcacttaacataataaataagtctagacatttaatgtacaatatgatgactagcgttaataatactgtattatatattggaaattttctaaaagtacatttcatgttctgtcaccaaaaaaagtgactatgagaggagatggatatgttaatttgcttgactgtagtaatcatttcaccacgtatatgtatatcaaaacattatgttatataatgtgatatataagataaatataattttatcttaaaaataaaaacactatgagatatcacttcacacccactaagatggaagaataaaagcaacagataataaccagtattggcaagaatgtggagaaattcaaagcctcatatactgcaggtgggaatgcaaaattgtgcagctgttttgaataatgatcgtctagttactcaaacagctaaacacagagttaccatgtgatctagcaattcctctcctagaaatacacccaagagaattgaaaacacatgttcaaacaaaaacctatacatgaatgttcacagcaacattattcataatagtcaaaaagtagaaataacccatttccattaactggagaattgataaataaaatctggtatatccatacaatggactattatctagcaaaaacaaatgaaatactgctttgtgctgcaatatggaagaaccttgaaaacactctgctaaatgaaagacgacagacacaaaagtctatatattgtatgattccacttacaggaatgtctggaataggccaatctatagagaagaaagtaaattagtattttcttagcgaggaagaaaagaggttgggagtaagtagagcgtgacaaaggaaaaaatatttctttttggaggtgatgaaattcttacaaaattgactttggtgttggtggcacaactgttaatatactaaaaagcattgacttttacactttaaattggagaattatatggtatgtggattatatttcaataaaaccataataataaaagatgacacatgttccttataaaaacgtgaagaaattcagatatgcaaaaggaagaaaaggaaattccttttactttttctttttcttttctatttaaacttttaacttggattcaagggataaatatgctggtttgttgcatggatatgtgcatgatgctgaggtttggggtacagatgatcctgtcacccaggtactgagtatagtagccaatgggtgttgtttttttttttttttttttgaggcagagtctcgctctgtcgcccaggctggagtgcagtagcgccatctcggctcactgcaagctccacctcccgggttcacgccattctcctgcctcagcctccagaatagctgggactacaggcacccgccaccacgcccggctaatttttttttgtatttttagtagagacggagtttcactgcccaatgggtgtttttttagcccaagaccccctccctccctctcccctctaatagtccccagtgtgtattgttcccttctttatgtccatgtgtactcaaatgtttagctcccacttataagtgaaaacatgcaatatttggttttctgttcctttgctaatccacttaggataatggcctccagctgcatccatgttgctgcaaaaaagacatgatgttgctcttttttatggctttgtagtactccatagtgcatatataccatattttacttatccaatctgccgttgatgggcacctatgttgattccatgtttctgctattgtgaatagtacctcaataaacatgtaagagaatgtgtatttttggtagaaagatttattttcctttgggtatatatccagtaataggattcctgggttgaatggtgttctacttttagttatttgagaaaggaccaaattgcattcctctggcttcattctttttgcttaggactgctttggctactagtggctaaactaacttacattcccaccaacagagtataagcattctattttcttcactgccttgccagcatctgttgttttttcgactttttagtaatagccattctgactggtgtgagatgatatctctttgtggtattgatttgcatttctctgatcatcagtgatgatgagcattttttcatgtttgttggccgcttgtatagtattggaagtcctagccaaagcaatcaggcaagagaaaaaaataaaaggcatccaaataggaaaagaagaataactatctctcctcactgacaatatggttctatacctagaaaaccctaaagactgctgaaagtttcctagagctggtaaacaactttagtacaatttcagtatacaaaatgtacaaaaatcagcagcactactatacaccaataatgttctagctaaggaccaaatctagacacaatcccatttacaatagccacatacacaaaaaatgagatgcctaggaatatatcaccccacggaggtgaaagatctctacaaggagaactgcaaaacactgctgaaagaaatcacagatgacataaataaatgaaaaaaagtccacgctcatgaattggaagaatcaatattattaaaatggccatagtgctcaaagcaatttacagaatcaatgctattcctatcaaaataccaatgacatttttcacggaatctaaaaatctactctaaaattcatatggaacaaagaagagctccaatagccaaagcaaccctaagtaaaaagaatgaagctagaggcataacattacctgacttcaaactatactacagggctacaataaccaaaagagcatggtaccactacaaaaacaaacacaaagaccaatggaatggaatagagaacccagaaataaagccacacaactacaaccatctgatctttgaccaagtcaacaaaaatgaacaatgaagaaagtactccctattcagtggtgctggggtaactggctagccatatgcagaagaatgaaaccagatccctacctttcaccatataaaaaaattaactcaagctgggctgaagatttaaatgaaagacctctaactataaaaatcctggaagaaaacctaaggaatatctttctcaacatcagctttagcaaattatttataggtgagaccaaaagcaattgtaagaaaaacaaaaattgacaagtgatacttacttaaatgaaagagcttctgcacagcaaaagaaattatcaacagagtaaacaaacagtctacagaatgggagacaatattcccaaactatgaatctgacaaaggtgtaatatctagaatctacaaagaacttaaacaaatcaacaagcaaaaaaacaacccaattaaaaaatgagcaaaggacaagaacagccaccttttttatttttacttttatttttttagagacagggtctcactctattgcccaggcacaatcattactcattgcaggcccaaacttcttggttcaagtgatcctcccacctcagccttctgagtatctaggactacaggcacatgccaccatgccctataaattttaacattttttgtagagacacgttctgcctatgttgcccaggctggtcctggcctcaagcaatcctcccacctcagcctcccaaagtgctgggattataggtgtgagccattgtgtctggctccattcacatttttaaaaaaacttcctttctatgtttcccaattgtttttaggtcaaaaaatccttatcctgaaaggaaagatctctcatgattcatcccattacttctccaatatcatatttcaatcactcccgagttggcatgatttgttccaactacaaaaaacttttcctgctaatattccatgctctcttgcaagtccatacatttgcacacaatattctcagggtttgtagctgttgatccctcctttcttcattgtgttaattgtactgatgcatcatgattcagcttaggtatcacctcccccagaaaatttttccagaaccctggcacgagctgtgtctccttggtgtctaatagttccctgtgtttttttctatgagataattcactgtatgtacatttttttaaataaaaatcagaattaaaaattatgccaactaaaaattgaaaaaaatttgcatggtgcctcaaagatctctgggacaatatcaaaaggtctaacatttataccattaaagttccagaaggagcagaaaaagaaattggtgcagaaagtaatttttgcataaataattgcagaaaacatcacaaagtttgatcaaagttatgaatttacagattcaataaatcagtgaacttcaaactgcgtaaacttaaggaaaatcatttctagacagataataaaacaataccaaagaaagaaaaacctttgaagtacctacagaaaaatgacacataatatatatggttaacagtaatttggaatactgtgaatttcttgtcagaaactatggaggacagaaaacagaagaataatgcctttaaattagaagaagataactgccaaaccagaattctataaccagtgaaaatatccttcaggaatgcaggcaaatacggacattgttagatgataaaaaactaagagaactcattgacagctctaaaagaaataataaaagaagttcttcaggctgaacataaatgacaccagagagaatcctggaatgtcaggaatgaagacagagaaacagaaatcgtaaatagctgagtaaatattttaaaaaactatttttctcctcttaagttctttaaaatacgtactgctattgaaagcacaaattataacatttcctggtggagttttaaaaatgtatttagatatatgtatttttatgtgtatttagatataaatatatgtaaactttaaaagatcagtgaaggatcgtgaagtggttataaggcttcacttaaaaaaatttatttacagtacaactcagttgaattttgaaaaacacacacagttatttaaccaacacaacaatcaagataccaagtagttccaagatagtgaacataatcatcacccccaaaaatttccttgggcccctttatattcctttcttctcttcccttcccacctccccaggcaataaatgtgctttctgtcactatagagtactttgcattttctagattttatatgaatgaaatcaagcagtacgtacccttttttgtctgaggtctttctcccagcataattattttgaggttcaattttgttgtgtgtatcaaagacatgctcatatatattagtgcattgatttttttttggcaagaccaagtctacctacagatgctatacatacatgaagtataagttagaggtaaagattctgagagaaagtatttggtatgttacctgcacagttcttggtacagtgctgtggatacacactgtaccaaggttagatgtcactaccttctggaagacagcatatttctatggaaaatgcccaagttccggagttaaataaaaacaatcataccaaagccatctgttgttaatggatgaacatccatgagcaagttattttgcctccctcttttccttaactttcttatccttcaaaaacagggataataacggcactccatttggttgttatgggcattaaaatgagatcacatatgtaaagcattgaatgtggagtttgatacacagcagataatttaaaatgctagttccttttcttttctaccctttttaaattttttaaaattttgttttaagttctgggatacatgtgcagaacatgcataggtatacatgtgccatggtggtttgctgcacctatcaacccatcatctaggttttaagccctgcatgcattaggtatttgtcctaatgctctccctccccttgacccccactcctcaacaggccctgatgtgtgatattcccctccctttgtccatgcattctcattgttcaacccccacttataagtgagaacatatggtgtttggttttctgttcctatgatagtttgctgagaatgatggtttccggcttcatccatatctctacaaaggacgtgaacatattcttttttatggctgcatagtattctatggtgtgtatgtgccacattttctttatagagtctatcattggtgggcatttgagtttgttccacgtctttgctattgtaaatagtgctgcaataaagatgcatgtgcatgtgtctttatagtaaaatgatttataatcctttgggtatatatccagtaatggaattgttgggtctaatggaatttctggttctagattcttgaggaatcaccacactgtcttccacaatggctgaacaaattgacactcccaccaacagtgtaaaagcattcctatttctccacatcctcaccagcatctgttgtttcctgactttttaatgattgccattctaactagtgtgagatggtatctcattgtggttttgatttgcatttctcttatgactagtgatgatgagctttttttcatatgtttgttggctgcataaatgtcttcttttgagaagtgtctgttcatatccttcgcctactttttgatgcgattgttttttattgtaaatttgtttaagttccttctagattctgtatattacacctttgtcagatagatagattgcaaaaaatttctccaattctgtaggttgcctgttcatgctgatgatagtttcttttgctgtgaagacgctgtttagtttaattagatcccgtttgtcaattttggcttttgttgccattgcttttggtgttttagtcatgaaatctttgcccatgcctatgccctgaatggtattgcctaggttttcttctagggttttcatggttttaggttttatatttaagtctttaatccatcttgagttaatttttgtatgaggtgtaaggaagggatccagtttcagctttctgcatatggttagccagttttcccagcaccatttattaaatagggaacccattccccattgcttctttttgtcaggtttgtcaaagatcagatggttgtagatgtgtggtgttatttctgaggcctctgttctgttccatttgtctatatatctgttttggtaccagtaccatgatgtttttgttgctgtagcattgtagtatagtttgaagtcaggtagcatgatgcctccaggtttgttctttttgcttaggattgtcttggctatgtgggctcttttttggttccatatgaaatttgaagtgttttttttctaattatgtgaagaaagttcatggtagcttgatgggaatagcattcagtctataaattacttcaggcggtatggccattttcacaatattgattcttcctatccatgagcatggctttattttgcatttgtttgtgtcctctcttatttccttgagcagtggtttgtagttctccttaaagaggtccttcacgtctcttgtaagttatattcctgggtattttattctctttgtagcaattgtgaatgggagttcacttattatttggctctttgcttgtctgttattggtgtataggagtgctttgtgatttttgcacactgattttgtatcctgagactttgctgaagttgcttatcagcttaaggagattttaagctgagactatggggttttctaaatatacaatcatgtcatctgcaaacagagacaatttgacatcctctcttcctgtttgaataccctttatttctttctcttgcctgattgtcccggccagaacttccaatactatgttgaatatgagtggtgaaagagggcattctacccttttttgtctggggaaaaattgtcatccttggggggaaaaaaaagcagtagcatctttgagcttaattgtaataccatagtgccatctggtgaccatatggaatgactgcattatccacatgggatatttcatgtctaacaaaaatctacaacatgtaaatctctagtgtgttctgggttagtgttatagggacagacagtgagggctgtacttgagaactgttctcctgagctactcctttggagatccctcccctggttaggcactttttcatgtcagaaagaaaaataagaattttcccctttgcctaccctaagatggtagatggcaggttgtataagcaaatgagtgaagtcttcacacatcccttcggctctaaggaagatgctgggaaaggggagttggtattttgtcttgttgagagatcttcccttgaaagatttggctactgtacctatggcctcgagtccaatcccaaataggagtttcaaactcaagtaaccccgaatagcacctagctgtccctaaatatgaaataaaggcccctcttcattcttccaactaccccagaatgcaaagaactgtaccatcagagtgtagccagggcttttgaatccatcacacttttacctgagctcagatttcatgaagtacctcaacccccacctccagtggctttgaaacaagtcttaacagatggtcactcttgccatccatcccatgccatcaattcaagtcaagactgatcaatgtactgaatatgaactttattgtgatttggtttatgtaaggcagtgtagtgaaggcactgcagaagttaaacagactggaaaacatggtaaaaaatgagcgagctaaaaatgaatgcttgctggtctaggtaggctaagtactacaactatgtttctttttcatcattgcagaagcgttgaaatattgttgaaggtgggggtttggggtggaattagggaaggcttcatggaggaggtggcatttatactgggccttgaaggaggggcagaaagttgataggttaagatggagggaagtacatttcataatgactgactctagagaaaattctgtagaagtactgaaaaatgagagggcaaacaaacacccccagcgagtgaagcatcccaactgagagaaaagtctgaggagtctgggctgggaccaaagtctcaagtccccagatggggtcttcagtacaaatgatattaggaggcacaggacaatgggcttgtttgtaaacctagcagcagcgagaggtttcacattgcagtcaggggccccaaactggctgtaatatgtctggatgaattctctcatcttttaggtgtgtatggtacttacttatctttcctcttgcccactgactgcctgaatggtagttcgtgcgcgcccatgtgcgcgtgtgtgagtgtaggtgtgtgtggatgggtgggggaccgaggctttgtctcccactgcagcttcttccacttttccgtcttgtggcacacagcaggcttccattgagctgaagctcaggcccctctcactgtctaggactcattgaactccagctcttgattaagcaccaggaagctttctcaacatgaaggtaaaatttactgtcgggggtgacttgggttagggcaggactacactttccggaggtgatgatggtggtgagtggtggtggtggtggtggtcgtggttggtggtggtggcagtggtgtctgtaagggttggggacttaaagccggctctggctgctgggtgaaatgctgctgggaagtctatagtgttcagtcaggagctaggatgtcaggctagaccagcttggccttgatcagccctcctccttcctcaacatgccctacaggggagatatatcaaacaactgaaaacatcaaagacatctgtagggtgtccagcctcttgttattgtcctacttgaatctcacccccggaagccccagagatcctttcttggcaaatgtgtatgatgtctagataggactgtcgcctccccatgtccagctgctggaggtatataggttatgtagctacagatgctacttggattgggaggtatggggaatttatcagaagagaggaagagttaattattgtgaatctcattctttctaaagattgtgaatcttaactaagacctggcacctgacggaaaataaaagggtggcacgctttgtcaggattctctgggattgcagatttagagctcagtgagatcatcgctggaaataaccttgaagctgatgtggccttgcttgactttggcagttggaccacccttcttacgcaggtacagagacttcagatcacggcagtcgctggggtcagcatccagagtaacctgccccaagaactgatcacagaattttcggctgttccagacctggaaagacaaacgaagggagtgaagatgagcagccctcagtgagattagcctttgcccagtgacatccagatctaatgctgagcttcaaaagatttgttttaaaaccaagagactattctgtcctttcctgatagcccatcagttgaggggaggatacctcaaagaatatacatgaaaagccagaaaacagaatctccgggtcgttcttgacctgtgggatggttacctaaaggctgctggtcaggagtattaagtcagaaaaactgccaaactgcagtgattcatcctgacctagccatgtgagggtcctctgaactggcataagctttcctccatgggattttatgatacgtgtgttaacatgtgtactggtgagcatgtgggcttttgcccacaattaaataaatggaagagaggagatttaggatggatggtaataaggaagtcagtgtccatgcttgatgagaagagtttttgagtataaaacaaaccaaaaaatacgataattcttgctctgcatcctaaacatatataaggtacttgggatcatctagtatctggtacaaagtatgagcctttctggcgacccctgtacacactcttacctgtactataataggaatgtcagtggtccttctgtagaaaatggcctgggtgtcaaaaatggcatgaactgtattcttctggacaggagaacggacttcctcctttccacatttgatgaccaaatatgggtttacagctggaacaaagtgacatatgtttttaacacagcaattaaagttccttttctagatagacaagaaggtatctcgctaagccaattctgggactttcagcatagcactcgagcaccagaatgactgagattcaacacttttattcccacttccctttccttttccatattttatataggaatatgaaaatgaatctaatgtaggccttgcttgaagttgacatcccatcctctgccatggttgccatccattcccaacttctctagacaaaatatcgctggagaaaatcatttgtgatcatgttttctaacttatgtgctataaatgcaactgaattttgctttcccagacattcctgccattcttactttcattggcatacttcttctccaggtcctcagcactgtgaacagtgatctgagtaactactttcgggtagccacgagccaggttccagcaggacattttgggcatgtccagagtcagttccctagaacatcaaaaataaaatattgtcatcatatgataaatatcctttgatgaaataagcccgccaaagcagacatcattgctgaaaagcatgagacattgtgtgacttagcccattcctcctcagatatgtcttatatatattttaagcatgctttcctttctcctttctttaagggccaggagataaagatcaaagtaggcagggctgggacaaaaaggtggctttggtgatccagcacacagaacataatagaagagcagggaggagtgctacctacttaagaaaagaggccatcagccagaaaacagaagacaaatttgatgtggaagaacttagactataggcctgttcctctttaagggtagctcagagctctgaagttcagaccttcactggggaatttcccccaaccaccctttgagaaatatttttaccaccatgatttcagtgaatcaagtctgatttaaacaagttgtcccattgaatgtctgaagaggggagacgggtgaaggggtttaggattggaagtaaagcaaagaacaggggtttgagggcttgcgaaggaaactgaacctgagctggacaggcacttcagagaagattctcaggagaaactcgctggtgcgaccatgctggaacatggttgggacaagcacatagttgcccttcttcaggtacttgctcagaaacactgtgcgggtgtcaatataggtggaagtcccagcacgctcctggatgtagaggtggtggaggcggaatttgcggttcatctccacctggaaatgaaatagggtaaaatattcaattccactcaaatcatggtttttgtatgctctgtcttttttatccctaggccttccattcttcccctaccattaaattatcctaatttttactctgtttgccttcattctctctgccccaaatgcccatttttaccttgaagagctcaaagccaatgatgtaattgtcaggtcttcccattcggcggtaagtgcgcaggtccttctgctgcagtgacataatgaccttgtgcccatcctcaggcacagtgaagatgtactaagggaaagagaccaccacagaggtgagttagcattcccatttcatatgaacgagcttaaatttcagggaataaagcttgtcattgggaagcagagccttgagttattttctgggctttcatatttatcagacaacaaggtcttggataattcactgacttgctaagcgtagaccattaacacttgtttctttctatgtcattcagcatgtgttgaaggacaaccttattcttagcctttgatgccaaagaggatatgctttgttctaataagttcttggtaaattattgtattattattattattattgttattattatccctttgtatttaaatgccatatatagaaaaagtttggaatccataaagacagaaaggtatttatttgactcaacctgacactacagcatcaccctgggctagcctccttttgccagccagacatacagcttgtggaagggctccttggagaattgatgttttgctacttccactttaaggaagctacaagcctgtgtcagagactttccaaacatcatctggggaatcacggtgctattaggagataaaactaaaaggcatcagatttttctctctgtctctgtctccattcctctctccctttagaaggaaacataaaacagctactcaggaggctaaggcagaaggatcccttgagcccaggaattcaagggtgcagtgaactgtgatcatgccactgcactccagcctgggcaacaaagtgagaccccatctctaaaatgaaggaaagaaggaaggaaggaaggaaggaaggaaggagggagggaaggaaggaaggtaggaagaaaagaagggagggagggagggagggagggaggacttaaaaacagactctgaactaaggcccctaagttcaatcctgtacatacatatagagtgaagccattttcccagcttagtatatgtgcctaatacttgaaacatttccagagttgtaaatggaggtgaggtggtgtgtgtggggggagataggatatttctttaggaacaattaagatgggaagggtggaagagcagtatgagttaggtgaatcagcccactagtctccatattctcctaaatgcctgaccaatgagatccatgaaaagaaaagacgcacccatgggcagtgaggcagcaatatagtcagaattcttgttttctatgagttagctcatcagcacattttgagatgaaaccatccaggttattatagattcagcctttagatgtttggattttttactctggagtgtgcgtggacttgaccctgttatgtcacctggaatagcactgtaatgggagatggatgggacagagtcgttgacagggcaatgattcaaatcctgggaaaaatgacctggatctagatgataaaatggaggcataataatggggttcaaaagagtcatctgcattagaaagaggaagaatatagtaaatgtgcaccccagagaacagctgggcagtaaagagaaatgaggaagaattgagggagcatctcaaagcagatcttctctctccaatatgggaccatcacaaggaagcagggattgtcaaagagccataccagacaatatggccagaagagaggcagccagaggaggtgattcagatttgatactgctgccaaagtctgtctctgcaaaaagacatagtctgctgtgttttacaagcacctgagacaatccgtagggatcctggttgttgaatattacacaatagctgcaaaaggaagatttgatgctaaagaaatactccagagatgaccaaagcaagatctgagttcctattgactggataactttgaggcaaataaagtaattgactcaaacctggggattctgcaggaaggtatcacggttgttatagcagcctcctgagcggttcatcaggggatcatcatccacagtccagcatcccaacaccgattccagctcctttcggccaaaaatagggttgttcacattgcggcagacattcagtttgtgaaagttgcggcaaaagtcctccaagctcatcctgaatggaaggagcacaggaaaaaaataaagatggtatttaatacttaacactgtagttccatgtagaagccccaattcccttagtgcagaaacccctcctcaccaaaactctccatcatcagacataacaagccccaggttcttgcgatctgatgcagtcagttgctgccactcttcagaactgaaagtaaatagaaaaaaaaaaaaaagataaatcattatgtttgccattgacttcttgtagtaagtaggatgccagagaaacagagtgcatgaggatcagtcctgctttatttcatctgcggctgggtcacagaccccgtgcctgacaaaagcccacagatgtcactgagcattgacagcacactagcagtctggagggatgggtctgggagaactacagggctttggagatgtagctgtgaaagtggaatgcaactcacatttcactccaggggccactccattcctgtcttcccaaggggtttctcaggcgaaccatatacaccttctcagcactgaagacttccacaagtctctctccaagacgaattttgcgaatatcagtcatggtataggtatggcccttcagcagaccccaatcagtttcaacttcttgctcctcctgattgggagactgagagcaaagaaagatatataaaggcacaggaattgggagacccaatcctgactcctcttcttcattaattggcttaacccagtaggattgaagctagttctcacacagatggaaatttcatcctgacacccaacttgaaacaaaaacagtagaggaaaataaataaagaatgtaatataacaactcaaacaagtcagattcaaactatccactgtaggacattaatatgaactgccataaaatttgatggggcagattcatttattgagcaagcagccataacctcaagatctagaagcagagacaagaggaataatttagcagaggctactgacacaagcctggatgctgcattggttccatgtggaatgactggtacaaaaggataaaaaactaaagcacctcagcttccacaccagggcaaaatgtgtattttagctttccaagtcccattaatagtttttcatgggtcttcgggttaagggcgaatttccctaccaaactttgtagtctcttctgccaggaatgagtatacagtggttgtttttcatgagtacaaacctcaatggaacagcagatcagaccacctttggtaaatgttttgtacagttctccgaatagcttgtacttctcctcaacaagctcagtgtatcttcctttctgcatgtcaacagtttcagccaatgtgcccgtgaagtccacaataatatcagtgatggtcaaaccatccagggcctcataacagcctagcagcctgagggcaagtatgcaaggttatctttgtaaaattgtttttccaggtcaagaacatcataatctaaagaatcagaacatcccctgcctagactttaccagatggcttttctctaggtatgaaatgagagatgttttgaaattatattcagaaatttctaggcttaggctatgttgatcaaggacagtctatgcagaaacttctttctacggggagatatgagataaagaaaaaatgaagtgatagtgccatgtgatctgcagatagcaggaggaaagggtacctgggagcaggtaagagtttaaatggaaacaagaacctctgatttctctctcatctaagatttctgagagccaggcccaagtgcaaagcaatgccttggttctgactgacatcttacccaacttaaactccagggttgggctgggagagaatgagctcccaaagataaatgtggctttcctttcctcatgtaccctgatagcagactagtcaatcacctccttactttgcataagctttttccagcagagcattccaaaactcattcatggaagtggagaaagagaagaccagatctccgttaatggtgggcaacaagtcatcaatcaccacttcagtccattctccaaaatgccagaaacgaaagtgaaatatcccagcgtatttttctgttttttgagggtcccattcctgttccttatggttgggaattgtctagaaatgcaagaacatttaatcaagtgttattcaccagaccacatccagaaactgagattacagtttactcctggcaaatctacagggcaacaggaagcatgccacatacacctggtttgagtctggattggaaattcctagatatggcattttgcccacaacttctgcttcctcagttcagttttgctgaggatgatatcaccatgcctgtctaaatgcacacaggagtacacagtgtggctgggacaaccagttagtggttaaatgctttccacaaataatctataaactagatgttgagaagcggactatataaacatattcatgattgcatgtttaaaatgcaaggcattctaaagagcaaaaccaatcaaaatcaaggcccattgtagtttgctttttaaatatccattctagagattttatatcaattatattaaatatggatttcatttgcattttgaataaaatcatgtttaggaattttttttgtataacagctacacattaatattctaaaattattttttgaggaaaatgttttaactttgtcccaagtcaagttaacacttcattgccttgacctctacctgaatgctaaaggaatttttgtactattaataatttattagaacttttcaagtcctacttctgtatttctcaccttttttgttattaatatgtattattgacttcctggcttctactgactttataccccaataggtacagataacataatatgcagagatactgagtcaatgcacggcaaatgataaccaaagatcagtgagcatatatgacaaagcaagtagagtaaaatgttaatggtagaatctaggtgggtatatgagtgttcactataaaattatttcaacttttctgtgtttgcaaaacttcttataatgaaatggagggaagtcgcctagttaatatctctgctttcaagaaatacaacaatctaaggaagttatgcgctgatttttttcctaaagttattaaagaagacaagaaagtggaaactgaatgaggtcccacaggagggataatacctttgtccaatgagactcctgaacagccaaacaggaaaatgcagaaaccattggcttgtgccccagtctcccttgggtcagctggtggttgctaatgttgcccacaatcagatgggggtcatcacagatgtcctatgaatacaataattggttatatgagagtctgggaagagtttctcaagagtcactgtgagctgaactaggcaggacagccttcatagaggagataaggttagggttgaaaaataagtaggatttccatagatgggatgaagggaaggctgaggggattataaggaaaaccaaaaaacagttgatcatctagccccatgtttggaagtggcaggagaaatgaaaggagagggtgtcatgagattgggtgccatgcggtggtgagggctcttagacatagctatcattggggtttgggagagttttcaccacagcagtgaactttccaaaaaaataataactaggaattagtacattacattctgatcctattttgccaggatgagattttctgaagcacctgtgcttggaagggagattgtattaaagagacaaggtctaatgaaggttaacattaattcatctccttctctaggaaaaccagttaggagaccttataggaagcccttttctaacataaagcaaaagcaacagtggtctccatagcaaccagatttttctacatttgtggatgaatatagatgacagcagcattaatagcaagtggtaataaaccactcacaggaacacttcaaccgacactcttcccagtgaaggtcctgaggggatctgggcagagtgggggcagtatttgtttggaatgtatgtgtgtatcttccccccaacatattaactgtgcctttcccactgggagtaggaaaatgatacctaaatgatacaattataacacaaagcgatagggcacagtagagtcattttcaaagcataattcatgtctaaaggaagaatccccataattctcctgatcacagtcagaataggattcatagtgttgttaacactggagttgactagaattaggcagttggacaagagaggggtacggtggcataacaggtagagagaaaggcatgggcaaaggcattgtggcatacatgacactacatagttgaagacataattgggtgactcagagtatcagcatttgaagagttcaaaggcaggaaataccaatgcattcttgactagatggagaaagcttcacgaggaggccattggccggtaccttgacattctgcttacgcagcagaaataaatccttgtctcaaatggaatctagacatatatccttttaaaaagtattagagacagctatatttttctggtcctcaaacctctttttttaatggccataattctccttgacgaagggtctggtctacagaatgaaacattccatatattctttaaaagccaaaataactctggaaagaaataggcaggcattctgggcaaagacaagtccaagctggagattaactgggcatccctctgccaaaaggagatggctagataggttgtcagctttggattctcaggtctttttttttagatgcatgcctggtagttcacaactactttttgttttaggagaattttctatcttaaaaaatattttttatgggctgcaaactgcctttgttttcacttgttgaacatagagcaggtatgttgggtaagtcaaaccctgatgttctttttcttctcatttttttggccttttctaaaatgaaactaagcacagtttttcctccccaggtcaggtgttttcattttattttgagcaagatgtcaaagtataaaataatttctggccaggtgtggtggctctcgcctgtaatcccagcactttgggaggccgaggcaggtggatcacctgaggtcagaagttcaagaccagcctggtcaacatggtgaaaccccatctcttctaaatatacaaaaattagccaggcgtggtggcaggcgcctgtaatctcagctactcaggaggctgaggcaggagaatcgcttgaacccgggaggcagaggttgcagtgagccgagatcacaccattgcgctccagcctgggcaacaagagagaaacttcgttccaaaaaaaaaataatgatttatttgacctagataatacatatcatagtttcctaacatggaaaaacaataaagtgaacactgatatatgaaaaagtgtgcttttagattaataaggcaaattatttgctaattttatgtagagttattagtggttggagatacattatggtgtcttgaatttccataaaattttcatttcacagtaggtatctaggcttagccaacacttttggcatgtcaacttctattgaagacataaagggtcacataagtgagcaaaaagacatataaacaattcaaattgaggaatggggtaattattctcttcttgacccaagatggatatgattattatatattatatgtgtctatgtatatacatgtatgtacatataatatatatattaaaagctgtgtgaaattcatgagagaatgtaaatttgggacccccccccccacaacattccatttcctcttataaactggcccattctccagttatactttaccccttttcatacgtgatggctatttaacaatagatttaaaacatgacaagttaacagtcatagaatgtcaaaactggaatgaattttggagactatctagtaaagcctatttttcacatgaggaagcaagctcagagaggggcaataacttgctactctgatcatctagctagtcagcaggagacctaggcctaaagttttttatttttcagaaccacatatggctagagaaagaagctgaagacctcagtcatccatccctgtgcctttaggctcaacaatggccaccacataaaggatgatattgtgcaactcctcagggacagagatgctactacctctttcagtcattcatcccagtgttttatgcctctgcttaaaacctacctaaacactcttcactcttttgggaaatttacttacctcttagcttttggttccaggatgaatatcactaataggcgttagtctgctcaattaaattcaataaatatgaatcaatctcttactatatgtaagcatcgtgatatgaaatacgggaaataaatcctttattaagccctatcttctgcctctttaaggaagtgaggcattaaaagactagaaagtagccaaggatttagaaagggtaaagggtaataagccaatgcaaacctagcagccaaacagactatttggtgacaaatttgaaaacaacaaaatgactgtttgttgacttctcccctaattttggacacactggatatcttcctgttggggttaaggatgtaagacgagaaatttttctgtaactcaaagctgagatgcagagtgcagatgggacatttcagcttgagctgtgctggagtggtaggaatggggttggaggagaggtcacagcacacatattcacaacatttgggtggcttaggagcaaggagggatgctgagcccctaatggctcccagctgtgctggcacagttgaagtgatcattttgtcacggcaaaatgatttcttaggaagaaacacacaactaggaagttgagtaccaagagtaaagctgaaatggtccccgcatgaccccacttctgagccaaaaccttccattaagcaaagcagcttctctaggaagtgtgttctcttagcttagtcttaagggacttctcattgtccttacttcatcctccttcccagagacctctgagcgggagggggcatacagttacaagtcctgtagccctgcacaaggcactctatgtgactccctttgcacctaccacatccaaattcagcattttttttacacaggtgaaatttactgacaataaacatggaggtccagggtaaaccgcaggaacctcagtaaaatgaaaagctgcccagaaaaccagcagccagaatagtggaaacactttcaaaagtgctacgtgcaatctagcagtagtgagggggtaggggtgtggacacctacaagtgaggtcaggcctgcagtaggtatattatgaataagtccagggtctaaatagtcccagaaagctcaggggctaatttgcacagaactgctattcaggaactgagggttttgtgagctagtccaagtagtcgttatcttacttagaaaattgaaccatcccccagatggagcatttataggtggacttaggctcagggactaatgttgcaccagcctctcaagaagtccacttttcctactggggagtttcaattctgcatgaagattttattatcaataaaatagtctcttccttcctaacccatccaaggaaagctcaatatggagaatagaataggatcttaggcccaacctccacttccaaactgggccaccaaatcactgtgtaatcattttctcactttaaccttcaggattctgctaggagactcaaggcacagatcccgaactgcttttttgggaagaatttatatatctatgcaacggaatactgttcagcaataagatggaataaattgatacatgctacaacatggatgactcttgagaacattatgctaagaaaaagaagccagttacttttatgattccattttaagtgaaatgtacagaataggcagttctggatagaaaccaaaagtacattagtggttggctgcagcaggggtgggggtagggtggagggattactcccttcaaatgtgcacaagggatcttattgaagtgatgcagctcttctacaactgggttgtggtaatgtttgcacaactttaaatttactaaaaatcattgctttgtatacttaaaacaggtgagtttcacaatatataaattgcacttcgataaagctgttaaagtttgttaatgcataatttaaaataaataggacagttggagaaaagactatgggcctattcaactctcttcaattgtgtaaacagtggaaaacacttaggactactcacatggggtgatatagtctctgggaagaaaaggaaattcttgagcagactaggccaaaactactatacctaggtgttgcattcagctggtggttggaaatttctattagcacagagagaaaagtgtttctttccttacggttccctcatatgctgtcacccaagcctgtatattctgcttctaatgtcttcccttatctgcctttcccttccattcctactaccataattttaatccagagcctcatcaccctcccactctcaaccagacaatgtagtaaaatggccccaggggaatgtattctagaggggaagactaggcaatggcaatggtagcgaaggctgaacttaaaacttgacaggagagctgacagatcttgtgcaggtgcccttttttcctcacagctgacagtgcaaattcccatgaggctttactcctttttagtcagggattagatgtgtctgattttaagacactattgtaggtagatatgagtcagtaaggaaaaacgccagaggtgggtaggaggggagagtggctggagggagctggagaagagattttctgtgggaatttggcaggcagatttcagcctaaaaatcctaccggcagtcttatgatcacactgtaactcagtataagttagaccttataatttatgaagactatatatgttgagctccaggagaatagaaaagtccaggagcacatggtctcaggtaatatacctgtgtattcagaaagctaggacaacagctgaggccaatagacggctggagaaattaagaagaactttcctctggagggtatgggcagatgatctggcattgaacaattgcaagacattcataattcctgtcatctgaagaggctccttaaaacacagcaaagaagtggcaagtgggaggaggggaactcaatcctgcccaagaatggggcggcggggggccgggggggcgccaaggcggcgaggggcggagcttgactggagtcagtttgttaaactatcagtggtgtttgcaggcatggaggcttacgaaggcaaaagccttcaacacgagaaaggaaaaagacagaaaatatcaggttaatcgtgttgcttccattttggagacttcagaaaatagccccagttaagtgtgcagctacatggcatgccaagggacaagatgtctgtaagtttcgctgcaaaccaggatctcaaccttgccaatgaggtgggggaggccaacggctcatctggccttcctgagccaattcagagaggcccagctctgtctctcagctttcctgatgggaggccagagaactttgacgtggttcttgaccacaggcttggcctccactctggctgggaaggaatccacagcttttggaggaggctcagatggtggtccagaaccttgtttttttctcctgctccccacaagaggccccttctccaaccattccaatctatggtaacctccccttcttcaaaaattctacatgatttactgtccatatgactgaaaatagcatttcatacatccaacattcatttcttttttaactatttgatagctcaatatccatctccccaactagaatgggagtgcctcaccacaggccatgtctgtgtcttgcaccaaggctggcatagagtaagtgttcagtaaatatttctctagtgaccctccctttgggcttaataagattaagcaaacaccatgctctcaaacgggagagtgtggaacaattaatggaagtgtggcatcaacacagtgaagaggaatatgagaactgactggagggaagctacctattttggtgaaaacaggggacacaaacaactaactctatctatctccctgatatgacagcatgatagagtgaaaacttatgcaggctttgcagtcaaacgtggatgcaaatccgagcttgttagcagtctgaccctgagcaaatacttaccttctcttaaagacacagtttctttttatataaagatatataatgggcatgtatctactgctattttttaaactaggaaatcagaattgcatcaaagtaacttttaacatgcctactttgctaagccatggtaaataagggtgaagtaaaataatgtatagaaaacttcaaacacagtatctggcccatagtacgcatgtcatgactgttgattctttttcctacccatccccactgttcagcctctctctctgattttctctcactttagaagggctattgtttgccttagaggcaaaatgccgtggttgttaagactttttccttccctgctaatccatctaggattcaatccacagaatttggaggatgaaggcaaaggacaatggactgagccaagatagagggggaaggatatgtctaaagacagccagtacaggaaacactgtctgcttggtgcacttctggggaatggcttcatgttggcttgcaattttgctgcccatcggatctcctcccacctcctccacctcacccctatcaatcatcccttttctcttctgtgtcttcaacctcttcttctttaccatctacttcttagcctataaatatgttcaagtctgtcctatttcagaaagacacctacccaatacacctctcttaatttcctgcttcctttttagctacttttgccctattgacatcttttccttcatatccaagcatcagaaaagagggatgccccttatttatcaccatccattcataagagtggctcccagacaacgtatctctatttttctccatgtatttttgcaaataaaaaaaaaagcctgtctgcataccaaagtattggttaatgaattctgctcatttcctagatttttcttgcaggtcagctaagtgatccgctggaatgtcaataactgcagacacagaaaggcaggaggagtgtaattttccttcagacagagcgaacttctcccagtctcatactttcaatggttgtcattctttataggcaaaaactaagagatatcctttgagttgcatagtaaacaagtcttgatgtaaccagtgtatcttgacaccacatggtagcaacgtgcataaacagaagtagctcttggcagaactccatttaggaatttaagctgtggaaattgcaactaaaagtgatagttggtaaaagggttacttgagggaggcaaacattgagatgatgcctgagatggttccataatagtacacagaaaggaacctcattaaataggacctgaatgtcttcaggatattatgaagttccaagaacttgcatttcacaacatccttctgtggcctatatacctcatcacctacattgagaaggagtttaggtacaatatccttctatccagttataccctttaggtatagcaaggttgcaatttattctccagactccatcatcctattgttttatacactgagctcctgctcatgtaggactagtgaaagggttctgaaacttgctttagagacacaacatacagatgatgcacagagaaccacaacaactattaatagttactactaataggtggtgaaagacctacaattctacttgaagcccacttgtccagttgtgggatgatacagatgacagtgtccatagagcagcaaagaagccttcttgcccccatgaaaaattcatcttctccctttaaaatttgtctcatttatgctcactttataaggagtttttctcctcactggtctgaaattacatttaaattgttatgacaggtaactcagtaaagaggcaagagcatagttgctttttgtgttaccatatttactcaaatgaacttccaagagaaaataaggttggcatatctctctgttttttgtacagaaatattcatagcatctttatgtgtaacagtaaaaaatactaaaaccaaccccaatgccctttagtgggtgactagatgaacaaattttggcatatccttatcataaattactactcaccagtaaaaacaaaacaactattgatacacagaacaccttgaatggatcttagattaatttgcttaaggttaaatagctaatctcaaaaaggtacagtgtatttttttgttgttttttctaagtaaatctgtcaaaatttgactaaaattcaggactccaagctagagccaggagcacagatccatggaactttcattataaagttttctttatgtgaggtgatgaatacgttaatttacctgattgtggtaattatttcacaatgtatatgtatatcaaaacatcacattgaacaccataacatacacaatttttatttgttaattatatttcaataaagctgaaaaaaaaagaaaggaaggaaggaaggttaacttctaaattggtctacacagtaggctttgtaagtgaaacagtggatcacgtagaagtatgatgaaggaggtcaaggagacagaatgtgtaaaatagaaagttacctggggacgtttccacaccacctttccaggaagcagtcggttgtagaaaagagaatcattctcaggcagaaatgttggatcacagaaaagtctgctgtctttgatgcattcctgcttcagttcctggtatttctggtttttgaagagcttcagaggaggacccatagtgttgaactatgcctagaatgaggaaaatttttgtctttgaaggaagaatttctcaggtcttttaagggttacctgagattagacaaacagccgtcatcccagtgacttcttcccagagctaggcacttctagtttggctttaaaggaaatgtcaccattttcaaagaaagaagtgtccacactccgcaactaattagtatggggccttgggtaaggcacctaaccattttgggtctcagtttctttatctgtcaaatggggcaatatgggccttaatcttattggggaaaaatcaataataaaagtaaagattgtgaattaaatgtgattcattataatttaaagagaagtcttccatttacaccagcagggagtagttcaaggcagagaacaacttgaagataagggaaaaatcactttactgtagtcagaataatttggtgccctggagagtcgcacactttgtgcatgaggggaaaagcagcctctttccattccagcaagtctttttacacaatttcttccgtcttgtcatttaaagagctttgcattttttattattggccaggaagactactgcaagaaacagctcagcagatggcctccaaagacaaggaaagacagaaagattgtatggtctttcttcttaaaagtctaatgtataatcctttgcctgtgataaaaggcagactctgaaattcaattacactaatttggtgggctatagattgttatcccatggcaatacactcttgctttcttttctttaaaaaaaaaaaaaggaggaaaaacaaaaaccttacatggctaaacagagaattcatatagtggctcttcaagcaatgtctatcagagtgccccacactcaagtgctcttaacaactggtttttaggaagataatttgaaaggcaaatttgattttcaatagctttggggtgataatagggttttcagtgctttttcttgattcacaaagatttgtaatgattttaatgatcctctcctggcattcaacagtaaataagaatgagattgtgaaatttacatggtgtcaactatttcaaaatgtattttagaaataactaaagtctatattctataatcacaggagggttgaaacaaaaaaaacctgactaagctacagaatgtctgctaaaaaataaggagaatacgttagcactttaaggagtatctgtgtggtatatctgtgaggcagtcgctgttttataaaaagtgaaatattgatcagacctctctactagttcattttatatcctttcagtatcacattgaaatgcctcactggtaaagaagtttccccatttgaaaaccataacaatttttaatttaaatgtttgcaatgttattacaatgttatttgcaatgtatgtacaacaaacttaccctttctctgaatccaaggaataagaagctgagaataaccacatttttttcatagccttatttattggcaattgcttttaaaattgagagctgtggggacactgcaaaatactgatgtcccttttttcatcagatttgtctgctcatgtgttttaaatattaaagtgtacttcattgtatttgaaagcatggatggtatcagtaaaaatttttagttatgcagcatcagagccaacctgaatgtttgcccagactcctttctggaggctgttacaaatggatcccaattttcttgtgtgctcaaacttacaacaaacactactgcgcctcttgctttccctagaaggtttggtgaattgccagagcctggggactgtaaatgtggaaaagcctggggcaattagaatatttagtttgccagaacctcctagtccctggacattctggataaatgagtatttcctgttctgccttcaaaggtcttccttactactcggtcaaatggcaaggcaggcaagatcctgcaaaaggaatccctgttataaagagggcctgtgtacagacagaagtagcaccaattgaaaggaaaatcaggtttgatttttaaagcccatgtgatcccaatagactctttcagaggcagaatgtacagctcacatggatagattacagcttgacggaacaccttttgggtcagggtgcctgtgttctggggacacacagtaaataaagaagagcagactatgagcctgaacttccactacagtacaactgtagtcccaagtcctctcggacttggagagtagaagtgaccttcatgtggaggttgcagtgagccgagatcgtgccattgcactccagcctgggcaacagagcgagactccgtctcaaaaaaaaaaaaaaaaaaaaaaaaaagtgacccgcatttctgactgggcaacagaactgtgatccatttgctctgtgaccttgttctctttgtgcctcaaatttttcatcaggaaagtgaggttatctaccctgcccctcttacaccatgggtgtacctaatgagatggttggtgtaagaggaattttgaataagtagaaagtgatccataaatgcaaaatatacactgaagccctctcattgcctagcattgagctgggcacacaaatattgttcagaaaatgtttgttgaacagataaatgtcttatgtggagaattagtgattgcatggcaatttcttgtttgaaatgtgcattttacattttagttcgggttctcatcatagcagtcatgtttaatgagattatctgtgcccttcattttgtatctgcagaaatggcagctcagagaagcagtagctagaaaatggcagagttaactcaaatccaggttctgtgcaatgccagattcagtgtgcagctttccatcacaccacactgcttcttttggtcactgccttcttagagaaaggattttttagttcaaatgaggaaatcctccaaagcaaacatgatactcaactttgaggcattctgcctagaatttattgccatggtagacattgaaaaggttctttattttcatggtttgatgttcatgggagaatctgaactctttacatcggcgggttcatcatttaaacatcagaatacttttggaaacccagaaatttgtaagttgagtttgtcataaacaacttactctgttggaacggatgagtgcagagaagggaacactccctcctttctgttctattgcacccgatggcgatggggaagggagagcccttacgttaaagatcacatattaggaaagtcgggagacaagataaaagttagggctttgagtataaacccagggatttgaatataaaccaaggagagcctctagctaacaaaggcaatgtggacatttgagaagagggaccctgtggcctgagggctagtggaatgagcggttgggtgaggcagagtgtggtggggcttagcattgaggtaatggtcttaggcaatattattataattcagatccaccactttgagaaagaatatgaggacaaccgtgtctgccaaggcaaaggataggagcgggcccagagtgcagaaagttgagaattgccagggaagttgagggagactgccacgtagaatacaaggctgcagtttaaagagagaggtattttttttctactcactggactggaaagcttgaggaagctaggcaagtcgtgaaagcaaaatctcttgcttcttaacctgcgggttagccttagagcaaaaagcatattttgctctaaaaaaatctgataaaatacatcctgtctgtggttcacaagccactttggatttaggtgagtgggagagaacatgagggaacttaatggggagagggagagagggcatggctgaggcattgttcctgcctagtttctccttttcctcagtttcatccctgttctgtacttggagcaaaaatcaagataaaatcaataaaagtttgcagacaaattgaatacagaagacccaattctgccctggcatgaagtaggcaccacttttacccacaatccacatcccttatccccacacctggggggtggtatggtgagagaaaagggacttggataggaaaaagtaatacaaattcagcatccacatggtatacagagaatagtgcttttcataggtacacaggcagagtcatagcttacatacatgggcacgcatttaaccacaggacttatgtatggctgttcagattcaaacttctaaccagatattctgggtctaaaaaggaccacagagatcctctgatccagcccactgccttatataggatgtacctactggcccagagagaagagtctgttcaaagccattcaaaggaaaaaaaagaggacacaattttaattcggttgctcaataactctatcaaaaaataaaaagcaattcaaaatgataaaaggaacacaggtggttacaagatccagaaacaaatccaaaatatcaccatttagtatacataacatctcagtccctcagtttccacatagcacaatgggaatatgttagcttccctgtctacttcagagtgttattgggagaatgtaatgaaattatgtatgtgaacatactctttattgttaaagataaggctaaagcagggcagtagtattaggaagcacttattttaacaagttaaatttcttttctgtctttaggggaaactaatgaaatttgatcatgtgctttaaataagacatgcaccaacatttaaaagactaatataaaaattgcccctccaccattctctacacctccctatttcacccctccttttttggctgacttgcccttttggccgaataagcccatcctatatgtctacttttccagcctttcaagaatcaaattctgattttatagaatgttatgttggaaagtctgttagaaatcacttagtacaacttctttcttttgttgtaaggtaaaggcacttgcccagggttatgtagttagtgacagagcccacactaaaactgggacctcccaacgtttttttttaaaccacaatttgttgtaaggtggggaggagggcaaacatgcagacacaatatgtcaagcaagacgttgcttttaaaaattcatattgtactcttctcacaagaatgcacttagaagttttgtttttgaattgcaagctgtcagaaggtgagatgatttcaaatcaaggctaatcaaagaaacactgttttggggtcacaaagggactttttctgcttttaatttaggaactgaaaactcccaaggatatggaaagcctgctttttaacctattcctgaccatgtaagtgtttagactttttccctagactgctagggagtctaaggacaaataaagaacgctatttgaatacaaagtattcacacacacccaggcacacacgtgcacataagcatgctcacacacacacacaaacttccagaggaataaaagagttaattagcagtccacaaataatttttttgtttattacttcagactgtaaagtgttcttactttcacaataaagattagcaaatgaggcattagctgaatttcaatacaccaataatacaaaccaggatgttttatcctgaagccagaagtaattgttaggacagcagaatttgctgagttttcctatgtgcttttcagcaaacttacagttccaaatcctcagaaccaattgtttccattacaatgcaccgctcctttttcccgtcccccacccaaagccagttctgatcaagtggtccagtgaagaccctagaacagtgtacttggcctgggagtggaggatggagccccatcttgaaatcaaagtttaaaccaaagctggaatcagaggggaacaaagccaggccagaggctgaaaatggaatagccaagatcaacctgtcaccagggcaggaagaccactggctgtgcagacagggagttaagatagacttggccaccacttcctcctgtacaacactgcacagcctgctcaccctcctaccagagttcacaggccttttgcacacagtgtggctccaagattttgctcgcatttcaataattttcccacagctgtgggtcagcagaagctagaaggaggccctgaaaggagccacgcttctccccctcaacaccatcccctgtgatttttcctcacttaccaggtattttgggtagcagaaggcaaacacatacacatgcacgcgtgtgtgcacacacacaaaaaactgaccagatatccccagaaaagtttcattgccagacaaccacaatcatcaccccacacacccctcaaaataaccaaccaaaaattccattatttttgaagttctcaaactgctattaacgggcacatatttgatccagacaagccataaaatatagctgtggagtttggttaactacaaagttgaagtttcttcatctttcttagacgctaagttatccaggaaataaaactccagggtaagtttgcgaattccctctctactcacctgagttatcccaggagccctgctgctgctgctgctgctgctgctgctgctgctgccgttgccgctgctgctgttagccaggtaaccccactaaaagtctgttcagtcagtgtggctgaacaaagattctggctttcttaacctgaaaactatttgggctgtaccaagctctgctcacagggggaggtgcctcgcagcaacttcaggaggctttgccccgcccagcagtcagaaactgatcctgagtcatgaggaaaatgtggaaagtgcctctaccagatgtgcagacgggatgcccactccagacccacccaccagcaaactgaaaaactcaggaagccacgtttgaaagctctttcggtttcaaggagaaataagactttcagcgaggattctgatagatttcttacttttctgtcccagggttaatatcacagacatgcacattactagagagaggacatgcagagaaaaatggtgaagtgttggcaaagttaatatgggctaggctgcagacatggccctggtcagacatggccctggtaggcagatctgtgatagtgatgaggacttcaggaagtgactgggagtgaaagagcagctaatggggtgcaatgaagaaaaggtcacttcgtgaaacaacaggtaacatttggtcaaagacagagagaagggattgttaagaggaaagtgaatggagtttattccacagcagctataagaaccctaatttctagcaaccaggctatgaagattctgcacagctgtgttaggtgagaggagagaaaataattgtttttgctctgaaaggccaagcaagatccctataaatactatactgcatcacagtcaaagtcctggtcccttcaacctgagacattcatttggacacaattccaggaacatgattctcaagttgttttgtttgtttcattttcacaaactgtaaagatgctcatcatctcattcctcagctttcctgaccagtgtactgttaacccttgaacctgaaattacttccttctacccctcctcctgcaccaaccctcctgctggctagttgaagatgtaagagataaggggggttggggataacaagtgagcaacatagagctcaacaaggacaggaagcatgttctctctccactcactgggcccataccaatgttttcataaaacagttctgagcatttctataactctggtctctgagatctccttcttggcatttccctacaactccctctgtaccttctatgccaagatggaaattcagctagaggtagggcacaaggaaacaggggtccagggcaattaggcctctaaatattggcaaccattcagctagacagtgagatagtcctcaagcaaatatccctggtatggaattttggttttaaaatcaacggaggatgttttgtctgggctcatattctttagccatcttttccaccttcatacttgtaaatctagcagggaatcacagaacctgggaattggaaggaaccttagaagccatgtttatcctcttgctcagtgcagaaatatccttctgacagtctgagaaactcatccctatgcaaaacagcttattccatatttgatcatttcctaattgttaaaagggtcttccttaggttgaggaaaaaatagcttcacacaaacaatttctaattcctctttcacatgacagccctttaaaatatctagcatgtcacgccaagtcattcatcctctgggctaaatatcctcagttctttcaaaccatgcctcataggacatggtttacagactttttgccactctagttgtcttttgagcataaatctactcagtgtgcagcccgtagcttaatcaaaatcctctgttgtttcttgcatgaactactactatgtgcctgattctaggtttgtacaattgacttttaattttacctggatgctgggctttgtattcattctcaaaaaccattgccttgtttattttaatctatctccttaagatctttctttatcttgagcctcatatacaaaatcatattctccatagtaatgtttctcaatctttttttatcattatcacggtcctaaagagcctttttagatatttttcccaatgtctctccgtgaaattttaataccacagatatgctgtctatctgtttatttgctgtctatctgtttatttgctgtatgtatatctctgtttcatgtaaaaaagaaatttttttttcactcttcaagaatcaatttttgccctcttgggggcaatatcacccccattgagaatgcatgatctgtatcaataaatgttttatatgtgtatttgatcagccagactgatgaaagtattgaatgagagggtccaggacagaatactgcagcataaccttaagagtcttccccttttgataaggttgttcaaacttgaaacaatccatataactcctgctaccacccagctctgacttttccatcttcttcatgaagatatcataagactttttcaaatgtcttgctgaaatccagatacagtatactatggtatcccagtgatctatccttttagatacccttttcaaaaaggaaacggacttagttaggcatgtcttgcttttagtcatcccatgcttacccctagtgatttccgctccctttctaaagcctcacaaacgatctgcctaacagtgcattctacacttttgccaaggataaatgccatgctcattggtcttcagtttccaggatctatattttgcaccccacaccaccaccacctaccttcactaaaaattgggatatttccctgcctctttgcacccctcatgtcttctctttgccataatttctcaaaggttaccaagactggctctgtgatcacatctgcacattctctcagcagcctcaaatgtgatttgtgtgggcctggaaactcattgaaggcagctaaggactcctttattatctcctcatctatcttgggctttaattctctttccagttcaaagatcatgctccttgatggagaggttaattaacttgcccacagccacacacctagtaaattggcagagctgggatttaaatcaggctctatttaactctgaagactggctcttaaccagaatgctatgagatttcaaacaccaaatgagtggtatggcctatgggtgttgtatgagttccaaaatgggagagaactattttaataagagtagtcgaggcaggccttatacaagaggtgaaatttgaactggatcttaaataatgagtaggatcccaataggaacaaaataatgatgtgtgcatatgttggtaggaatcagggaagagactgaggatggcatcccagtcagaggaaataacaaagaataataaaggataagaattgccaccttggtctgcctcatagtctacttggttgatcattatgaacactaagataccacaaatggtcaagagagagccagagtgttcctgccttaccttaataatagtttattaaagctctgatgcttgctacttgtatattctagggcaaggcacagcccttctggtccttggtttcctgctctataaaataggaataaaacagtcctattttcaataagcatttactgagctcctactatataccagatactatgctagttgctggagttataatggcaggctataataagaaacatgatctcaccctcaataattaaaaatcagtcatgtatttgctttgtggaagttttcagtccatactactattttgttccattatctgggtaatgtggcacattttacttatcttaaaatgacctcatttaaaagcttgtggggatagtggtaaggaggcttttgatatggtagcctaggatttgtggagcaagttggtgtctgctgtctccaagatgttatagattctggttaattccatctcagccctcacccaagtcttggattctgttcttttgcttcctctagcctcattcccagcccaatattttcccctatattgggcattttccatccctagattgtaaaactgagttccctgagggagaaaaaaaagccagctgcacccagtatgccaagtggttggcaggggcgggggttgctgtacattggtgtagtatggctctgccgtgtggggcagtgtcatttggttttggctagctaactacagtccttgcctctttttagcttgaaatcctctaaggccagtgaaagtgtgaacagaagccacggaagaggatggactgtcagcttccaaaccaaatagccttggggtggagttcaaccaagattttgggagagtgtaagttggatatcttctctgttggcctggttaacacaaaaatatgcttcgctggctggcagcagaacttttttttaatcaggggaagcaactcatttgccttgtcaacaaaagggctctagtttctcaatattagtcaaaggaaacctctgtccctagtaattgaaataaatggttacagtggttgctgatctttgactatatcaaatccatacccctctgcttggtcatcaaacctctttctccaccaaaagcttggtttcaccactacttggcactagtctagctggcctttgtattccatttctcagggctgaacaaaactttcaggaacataacctccactgggctggtgttagagtaggagactcagggctggaaaaggttgggtggagggtgatacttaaaatacagatgtcatccaagtcttaggcataaattgtagctgagaaatggtcagccctagagaattgagcatagggtaccaggtgagagtgggcaaggccacaggcagaagacaaggcaagaagtcaggaattgaggtgatccagaactcacaggtcaggaagtattgtgtaatgtgggatggagccaaataatgcaaggcaacagctaagaacaaagccacagatcaggtactcatttttaatggaggttggagtcccagcatgattcaaccctaccaccatatttttactcaagttatgcccccggctatgactgttctttctcacccttccatctacccaagtcttgcttattttttgattctccaaccttactttctccacgaagccttctccctccctgagtgatctgcactctttctgaataatcatctcactttgagtcagtatcatatcacacagggttctagttaatcattcttcaatgtttcatgtgtgtgcttggatttcctcagactacagactccttgaggacagcagctctagcttctgtacttctacactccccacagtgtgaagcacagagccaggcaccaagtaaatgtgcagtaaatacttggcaaggaattccagagatattcagaatggaagtcagtagcaacttagcaagagacttgaaattagcccaccacacacgtgagcacatacacgcacgcacgcacacacatacacacacacgtgcttagaaaaccaagtaaaactgtcctaaatgtggaagtcatggaggatggtattatactatccctttgtcagagctaggtatacataaagagctctttgagagctgggaaagcttatagaattagaacaaaatgggaggaggcagccttgagttgtaattaagctggagggtgaagtaaagatagggagggggttagaagcaaacagaaatatgaaaaatttctaacatggaggcaagggactctttttcagtccccgtaatatgtcattcatctggcatccactaatttgggatttttgaaaaatcggactaagagaggttgtagcttgttatagccagatcttgaaagaaaaagagctgctaaattaattaagcctcctccatgatgggagagacagtggggcatagggaaaaatcttgtttgacttagttaaaagtttcccagttccttcctagagctctttagaaacctcgttaagctacttgtaaatcctggccattcctgtccagttttttccttatcataaacactttggagtattaaaactacattaaaaatttacaattccaactttttactatcttagactccttctcctccttccctcctcagctggtaccaaaagagaagagactaggtatggaaagcctcaaagtactgggagctttcctgtgctatctcatttcgtcttcacagaaataaccctgtagcagagataattttttcttggttatcagaggggggcacctgctgggtgctcgggggtatgttaagtaaccaggctaaggctacacaagaaggaaattgtgaagcccctgcttctaaaaaacaattcttccaactccaaagacctcctgctttctcctagactatgttgcccctaaattgaaaataatcattgactaacaggagattaaaatatttttcttggaaaatattgctttattagtcatttaagtggctgtgaattcatgagaagagcacatgttcaaaaacagaggtcatattcataatagacaaaaactggaaatagcccaggtgtcctagttttagaaatggagaactgattagcatttgccagggtttgggggtggggagaagctgtgttgcgggagggaggtgggtgtggttataaaagggcaataccacgaaggatctttgaggtgatggcacttttcagtatcttgacgctgatggtagatacatgaacctaatgtgtttaaaattatatagaactaaatatatatgcacagatgaatatgagtaaaatgagaactctgaataagactggtgaattgtatcaatgtcaatatcctagttgtgatattatactaaagttttgcaaaatattatcggggaaagctgagaaaagggtaaacagaatctctctgtactatttcttacaactgcatgtgaatacacaataatcttttaaaaattcaatgaaaaaggagataatatgtagtggctatatatatatatattcaatatatgtaatgtgtgcatatatatgtgtaaattcaatatatataatgtgtgcatatatataaattcaatatatataagacaattcaatgaaaaatgaggtaatatatagtgggaacatatatatttatatatacataaaattttataataaatatatatatataaatcagtgtattatctctgatctgacagaagtttcttttgaaagatacctaatgctagatgacgagttagtgggtgcagcgcaccagcatggcacttgtatacatatgtaactaacctgcacattgtgcacaggtaccctaaaacttaaagtataataataataatttaaaaaaagaaagatgatgttacaataatcttgtaggtttgggtagttcagccaagacttggagacaaggtggtgggaattctagctcagggaaatcgttccccagggaaaaacacaggttgctgagcccgactgagtgcaacggaatgggagtgtggtgtgaaatttgaaggagtaggtttcacgcttcattcaaggccataacttttcaggttcctctgctctttgctgagagaataagctctgctcccagaggcctgattgcaatgagccccagctagaaccagctacataatttgctgggcctagtacaaaatgaaaatgtggggcctcttgttcaaaatgtattaggaatttcaagatagccactgcagaacgttagactaggtgtggggccccaccaagcacagaatgctgtgcaactacacaggtcctggcccaagttaacatttctgctaaatccccacagctgcaacatctagagaacacagaccatcacccactttgcagcccttccctgctagtctgaattgactgagatgacggaggcccaagtggctctttgggatccattcactgtttagtcacagttctgagcactggtaaatccctgctgactgatggactggactgctgttccatagaccagatatagagcaagagagggtggaacccagaggcagaaggcatgctggaaaactctggtgcccattgacaaaaaggaggctggtgagaagcagatcaggctggtggccattcagaaagtgtacaatggatggagcactaaattatagcctggagacctgggctcaaatgccagctttgacaccctcgagatcattaatttctgggcgtgtcagtttcctcatgtgtgaaatgaagataatataaatagtatttttctcattgggctgtcatgaggatcaaataaaatcacggatatgaaagcactatgaaaactctcatgtgaacagaaatgtaagacatctcagaatgaccaccagtctgattattacatacacatccctaagcctttgctagcaggtggtggctggcctgatctggatgcctgaaataagaagtaaggttaaaatgcatgggccagatatccagttctggccaagacagaggagtcccattccccaccctcaatcccagtcctggccaagacagaggagtcccattccccaccctcattcccagtcctccttcttacaattaaaaaatgctggctataacacaacaaacaaacataagaaggctgaaatgtgggaagaagaaggcagacaacctaagcacctaaggacttgagaaacaacacaaccttgaataccctgggttttcttttttcctcccatatatctcagataggatgttgtagaagactccaacctgaaacgtcccacaagcacagatgaaaaaaggtgttccaagcaaagcctgttcactgtagccacaggactggggaaaaggttacctaaaaacagaaaaccttttttggcaatactcactctattccaactaaacatcaatggcacaactgcataccactcctctgggatttcagtggggctgagtggagagctgatattctatcccctgcccggcagaaacagttagtactcttattcccccatcagagtatggtcagcttagcagtgagctgagctgctggttagctccactaccagctagcagcaaagagactgaacaaggtgatgtgaggtagggctagttagtttcaacaagcaattactaattctctggaaacaaaggaaaaactggataatctcagcaaagaaatagaaaaagttaacaagaaccaaagggaaattatagaacttaaaaacacaacaactgaaatataaaacactcactgaatgggctcaatggtagagataacagatggtagaatcagtgaacttcaagataggccgataacgtttacccaatgtgaaaaaaaaaaagagagagagaaaatgactgaaaaaaagtgaacagggacccagggagctgtgagacaataataaaagtgctaacatgtgtatcattgtagttctggaaggagcaagtaaggagtgtggggctaaaatatatttgaagaggtactggctatgaattttccaaatttgtcatgacataaacctaaaaattcaagaagcttagtgacctgaaacagaataaactcaaagaaatccatactaaaacacaccataattaaacatctaaaaattagaagtcatggtccaaaagagatcactctctgccaccccatgggttttggggaattcagtacagaagatcttcagagctgtcagcctcccctttctgcatcataacagggaagaagggcaagtcccacctacttcaaaccctggcttccccaggcttaactatcaagcctatcattcattcattcaacaaacatttatgagcacctaatatttactagtcattcacctcattgctagtgagacaactgtgaacaagctagagtctctgcccccatggagctatattctaataggtggagatagacatacagggcatatgttgagaaagagggtaactaaacagagcagtacttatttagacacatacttttcccagaaaaggatcttacatcagccaccatttcattcactcaatatttattaatcactcaagcactcacaatgtctaagaacctgctcggccttggagacacagttcctgccctcaaggaacaaatagtgttcttgtaggacacggttgcttaaccacaatactgttgacattggggattgaataattctttgttatgtgtgttgaggtgggggctgttctgtgcattgtacagtgtttagtaacatccctggcctgtaccctcagaaggcagtaacatcgttcctccaagttgtgaaaaccaaagatttctacatacatggccaatgtctcctggtaggcaaaaacacacccagttgagaaccactgttgtaaggtaaactgaaaagtggaccaatagttgatataaaatgtgataactgctatggtagagaaacctcccttggctccaccttgcttccaggccctttagaggtggccttactccacttccagccttatttccttccatgtggtcaagcccccactatactgcactctaatcatccccagaacatggcatgcctttttctttccccagacttttccatatgcccttttctctaccttgaataccctcccctggccagcaacctcaagtggcatagcactccttttaaatctttatttgaggtatttgtctcatgttgagggcagagactatgtcaagctgatctctgtatccctagtgcttagcatagtccttacttcctgaagtaatgcaatgatgcagaaaagagagaagatataattgtccctagctctcagattgcttccattctccttgtaggaggaaagagaaacagaagtgaacattcccattctgtacagcccagtttgtagtagaattaagtgtgaatatgtgcaagatgtattacaaatgatagaacatgggcggaggattcatgagatgaaataattgaactgggccttgaagccgttgatcatatgaaaggtatggaggagtagctaagagatgggagtgggaaaagataatagaacacactattccccagacagtaagaaaaccaaaccccagagagtacagacctgacacccacttcatgtacataagaggtctactcccaccctgaggtttgctcctaccctgatgtgtggataaatcttgaatcctttaagcaggtaacaaagggaaagggttaaagaatgatgggagttttggactgctggaaagcactgggagtgacaggtttagagaattaacacaggcacactgccaccaaataagctgatattccaagcacaggaagtgaactcttccttagcacttctgattcagctaatttagactgagcaccaatcatgtacaatgtgcttcctatatattgtcttgcttagctttcacaatagtaagatggtgaagtctcagtggcaaaatagattcaaaccaaagttttctggtgatgacaaagcctggttactttcattgtgccatactgccatggttagctcggtggacccaagtttgggatctggagatattcttagtgagctacttccttccttccttcgttacttttctccctctctataagcttctaatcctgagataccccatccaaaagagcatggacagtctctggaatggggcatccacaaatacttccaagactggtatgacaattttgcccagatacaaaggctcctctggagggtttctgggggaacttctttgtggaataggagagacttgagctgggcctgaaaggataatagtgcttttagacaaagcaggtatttggggtataaggtagagcgatctatagatcttaaagtcttgagtcgggggaaatgtcgtgtgtgttaggatggccttcagggaagaacagtgaggaagactggtggggccgggcttaagagttcatgttggcaaatagtgggagatcagaccgggtagagcctaaatgtagaggaattaggagtttacgtgagttctgcaagctggtatgtgtagacacaggagcctgcctagacaaatatagctgtagagacagtcatggattagttgactggggcagctgggaaggctgccactgggggtgggtaatgtaattgaaacttctttcatgccaagatcctctgaaatggaaatggtgaacaagggcccaccaatgacgaagttgtgtgccttgggttccttcacctccattttccaccctccgttctctttggatttcaatagatccatcttgcccttctgcacacagcgccctcactttctgtcaccagcagaatctcacccagaaccaccttctttaggaaggatctttttctctcactaactagttctctttccttccgccaaacaaaccgtatcattttttcttagggctccatcatgttactagcacaaacctgattagacaaattcacagaaaatgttagtgttttgataatgtcttaataatgttcaaatttgaacgagagcctgcaatgcctttgctagaagcaagggtcgccatgagactttaggcttagataaagggagattgtgatggggtgagaatagggtagggacaggaatttgagaaggggaccttttcatgacctttgcataaagatagtcttgcttgtttcttaaatatttgaaaagaggcttccctccattcccctccatattctccctaccttgttcctgcattccaggatcctaccagaaataattgtattaattaaacagcatttaggtgcagagaaaatgcccagtttggtttggggatagaaacttttcttgagttgttaaggacctcacagaactgtagctgctgctattggagccatgttcacagctcccttgaacactaaaattaacagatgggacacttcaatccagggcacagttgtcaaaaaccacagtttaaatcagtcacagacaactgtttcattccccacacttgcctgggtgtaacaactgcaggaatgcctctgcttaaatcgcatccagtgacaccacagagagagacatgtctaggctgcattcattctcaggactttctgagcttcttttagagcaggggtcagcaacctttccaaaatggggtgccagggttctgacccatgttcttttataggactagtgcgtgtggacttatgtatgcaaacaacggcaaggtgggagggtggtgaggtagggagaaaagagggagttatactgactcttgaagaaggagatatggtggccaactattagccagagacagagcaccgctgggtgacaacttacaaaaataaatggtgaggaaagggttttacctgttgcttctgactggtgtgcctgtaatagccggtctatgggtcatccctgggtatacagccaactctttgataatgactaatccatttattcattcactcaggcacttgttaagtggccacactttgtggaacactggaaacccagacacaaataagatgctttcttccctcaaggagctcacatcacagtctagtttctgttcccagtaattcaactattcatttggtgaactcactgtcatgtatttcactagcacttgttgagtgtcaggagccatcctgcacttgtggtatgcagagatgccgagaaaaatcagacaaggtccttgacctcaaggggattccagtctagtagcataaaaggacaagtagacatttccatttctattcagtgtggtaggagacatttggcttagatgagcctctgagacaccttctgatacaagatccctgatctagagggagtataccttagatttggggagaatcagccttgggggaggcagatccctgtgtctgagagttgtcttgtcactgtaccaggatgaaagagatgttacccaaaacaagaataaaaactgtttacctagatgcttggtaaacatttgttattcttgttttgggaaccatttctttcatcattctctttacagacgagaaataaactgaagttagtgaaatgaaatagggaggcctcctgatcaacagattatgttctacttgtggttcatgggctctggagcttcttaagctgatagtcatcctgtcaatgtcctactaccttgtgctggcaggtctcaatctgggggtctctaaaggcagcaaatgatacccttaagctatttttcaatattaaaaaatcatagaaattgtactttcagccaagacaaagccacagagagctaagtacaatatcatgtttctttgcttttgactgaaattatattagctttggtgtggttagctcatgtggatcagaagccctgagtgagtaaaaaattggaaaaacgaattattccataataaatgcagtttcgctagataaaaatttttccaaatgtgggggccacagggggaaaaataataaaagggatccttggtggtgtaaaggttggaaatcactggcctccacgtctggatgccaaagtttggctgcagattcaaagcctgtgaccacagaatcctgggattattggcatctgacacccctgatgtggttcctgttggaaaagcaaacatgctccctgcccagctttctaaagtgttatacattaactggcttacaaagcaccattcacgagtggacaggttttttttggatcgcggtttactgtgtttttgtacctgcagtgaaagaacgtttcagaggaagcacaggcttgcctaaaatccacaaagctatgctattgccagacaagcacagaactccttataactcacagagctggaacaagctgtccacatctttctccttctcattgacagccttcatccagtacctctgagaacgcacattccatgaacacacgcaaaatagactaagaatatccattgggtataagcaaagaaggaggggccctgcaggctagagagtgaggaaggaggtttgaaggagactggttagagaatcattctcactcttcccattgactgaaaaagctttctgcaggaggcttaggaggagagctcaggaaaacttaagggagaggaggcccgaggcttctggagagaaaagggatttccagtaacattgatcctagcctacatttaaaaataaatttttaatttaatggtgataaaatacacataagataaaacttactgtcttaactatttttaagcatacaattcagtaatgttaagtatattcacattgttgtgaaacagatctgcagaactttttcattttgtaaaactgaaacactgtattcattaaataactccacattttcccctcccttcagcctctgatagctgccactctactttctgtttccatgagttttcctactttaaataccttatatatgtagaatatatagtatttgtctttttgtgactggcttatttcactcagcataatgacctcaagtttcatccatgttgtagcatgtgtcagaaattccttcctttaaaaggctgaataatattccattgtatgtatatattacattttgtttacccattcatctgtcaataaacacttgggttgattccatcttttggatactgtgaataatgctgcgatgagcatggttgtacaaatatctctttgagatcttgccttcagttcttttggatatatacccagaagtgggattgctgaattgaatgccaattctatttttaatttcttgaggaaccaccttactattttctatagcagctgcaccattttacattcccaccaacagtgcccaaaggctccaatttctctatatgcttatcaacatttcttattttctttttttaatttttaattttaatttttgtaggtacatagtaggtatatatatttatggagcacatgagatgttttgatacatgcatgcaatgcataataatcacatcagggtaaatagggtatccatctcctcaagcatttatcctttgtgttacaaacaattcaattatactcagttagttttaaatgtacaattattattgactatagtcactctattgtgctatcaaacactttttttgataatagatttcctgatcgatataagctaatatctcattttgtttttgatttgcattttcctaatgactatggatattgaacatcttttcatgtacttgctggccatttgtatatctactttggagaaatgtctgttcaagttgtttgcccatttttgataagattatttgttttgttattggatttcagaattctttatatgttctggatattaatcccttatctgatatatggtttgtaaatatttctctcattccataggttacctgtttagtctgttgattgtgtcttatggtgctctagcctacatttaaactatttttaattgataaaatacaagctgtatatatttatggcatacaataagtttcaaaatgtgtatacattgtggaattgtgaaatcagtgaaatcaaactaattatcacatgcattatctgtcatgcttacctttttgtgtatagtggaaacacgaacaccagcccacatttttgaaaattatactttaagttctggggtacatatgcacaacatacaggtttgttacataagtatacatgtgccgtgttggtttgctgcacccatcaactcgtcatttacattaggtatttctcctaatgctctccctcccttgccccccaccacccctgacaggccctggagtgtgatattctgttccctgtgtccatgtgttctcattgttcaactcccacttatgagtgagaacatgcaccagcccacatttttaaaaacaggaaaaatgtgataaaatgaagaacaaacccagcaagaatgatgctcatatgccaggggccagatgagatgatttctccaagtcctttggaatcgatgttcttgagttccagacctcctggtgatgctcctccagagcccctccaaagcttttggggcaccactttgtctttacactattagctctaagctgcttctacagagaatgggcccctttctaagtaacctctttaacacccacaactttcttgttgctttctccatacctacacaatctaccttttcagacaacagcatcttcagatagcaggctcaaatctatttgtaacccctttgctgttccagttagggaagaggctaaactctaattttatgagagccgtaatggcaggacttagacatatgaaaatttttgcagaggcaagttggtctaatgtaaagactatcagaccatcactttcttgctgtgcaacagttcacagatcacttcctctccaagctcccatttcctgtctgaaaacatgaggataaccccaccccattctgctggggtttggtgaggtttgttcaggagaaagtttgtgtgctgcctggcacaccacaggagaactcaactattggtaagtctttccactgggcctggacttttcagccagagcaaagcatgcccaaccaaagcccatcatgataccagcccccagtgcatgacttgtctcttgttcttgtgtgcctctggtccagtctccacaaggttgcagcagaagtgatctatttacaacttttatctgcttatcacactctcctgcttaaaactctttaatgactctctgagtgctcttcagggggaaattcaaacttcttaatgtggctaaaagaccccacgtcgtcgcctctgtctgcctttctcatgtcacctctcaccacctctccaccataacactccatacttcagccacattggacttctttcagttgcttcaacaaatggtcctgttttattcagggccttcacatattcatttactctcatctggaacagctaacttttactcatctttaagttcagttaatatgtcacttcctctgggaaggctttcttaacatccctcaggttgaattaggtgtgccatggggccattctatgcttcctcatgtcacagcactgggcatactgtgtataattacatctaccttagctatatttggagctctgtgaggtgaagggccatgtctatttatcccctagagcctagcacagcacctggcacatagcatgttgcacatgtgtcaaacaaaggaatcctattttacctttccaacattgtctacatgcactcactcccccacactctacatcttaggctcttctacctcactagaagcctttctgatctccagacacattgggcacagatcatacctctttaactttgttcatatggtctttctggctggaagtctcttgttcttccctcttctcttccgcccctcccctctttgcctaacaaactccaacttatttaagcctcagctcaagtttcacctcctcagtgaagcctgtgcttgaagagaagcattaaaataaagatttatcctaggcaggataattcttagctcattcttcatcattaatgctttattataccaagtccaatatctaacagccttcatcaccccaccctagcagttagactgccctcctctgggctctctcagctccttacaacacctccatcatagcacttcctcaatgctttgggggatagattttgtttgtttagtttaggtttttctcctgaatgaggtaggaggacatttcatgtccttacccactccccaccccctgccgaccccttgtaagaggaccttagtctcatttcttcaattaaaacaaaacataaattctgtcccctcccccctaccctttgtcttttttttttttttttttttcctgccagtgtgcccactcattactgagacaagccagggctgcttccctttcaggaagcataattttttccaattagcctttgattggaaacagtaccattgcagctgggctgcttttaatgcctgctgatgggctgcctggtcatacggaaagagcactggcccaggagtggaagcccatctctgcgcttaaccaagggtctgaatgtgagaaacttcctttccttccttgggcctcagtttactctttttctgaacaatgaggaacttgaacttagtgttttgctattttaaagtgtggtccacagaccaggagcatgaagtaccagtgggcagcttgttaaaaacacagaatctgggccccacaccaaatctccaaaatcatagtctgcattttagcaagatccccaggtgattctatccacaagtttgggaagctctgtaagcttcgcagatgaaagattcactgaagctcttgttaaatattcagcttcccaggccactgtcctggagactcaaatgaggtggaactgggatggggtccctgaagttgtatttgtaacaagtacctgaagtgactcacatccctagaggactttgtgaaacgttagacaagtggttgataaaggcccttccacctttgacattctgcaattctatatgcacttgttcattaccaaggatcgtaaatagtgatacctaattcagaattctgggacttacccctctctccattagggtaaacattttttaaaacatccagggctgtgccagtgggaaaaggaagagagattacaacaaatcaagccaagtcttcttcattggaaagaatcagcacctctgggattcaaagagaaattaaattatctgcttactcaagcctctctttctctgaagcattcaagcttgatataatcagatgatctcaaagaccttcttgggtattgaaaaggggatattagaaatggagggtgcaacacctgtcccacactggcaacggaatccaggagaggggttccagacaagttgacaaggaaacctggagaaagcctctccctgaaaggaattctattttccaagccctcagtgtggatgcatggcctgtttaaaaaggggtgttttctgatttgtgagtgtatttatataaattatatatatagttgtatgcttaacaaatcacctttatttggaaaaggaaagaaaaattacataatttacataagatcacgactgccctggaaaattcaggatagaaagttgccagtttttctccatgtttgggcttgtttttcttataaatatgccctaagttccattgctggtagctttatggcaacatctgagatttagacaggtggagagaatgtggaagggcattcagagggtatttttctaggcagggaaagaagggtaggctctgtcagcaagagtgaagtgtgattgagcattgcatagcgagagctgaagtcggggaaggagatgcatgagaagctattgggctgtccggagcagaggcccaggtctgggaacaggggacgctcaggctgagttgctcaagtcagggctttctgttcttcccatttcctccctacatccaatctgtacatcagcttctgacaattctatatggacaacttttcgctcttattcctcctctctaccaccactgctctggccttaattcagaatctgcttttgtctctatctgcacagcttgcaacagctgtgaagaccctttccagagtgtctttactggtgtaagtttcttctcaagcttgaaaaggctatctttctctacagaaactaaatatatagacctaactgaaataaacagtctcttgcatcttttcttctcctgggagaagtgcaaactaacccaaatgaccaaaaagatcatatatgctgcttaaattctcactgagtcctcaatgaaaaggaagcagaattcacaagagcagggggttctcaaactagagagggtctcagatgcctcatggagagcttgttaacacgggaatcgctgaaccccacgcgcagagtttctgatccagtatatgtgggtggggcaggcgtgtgtgtggccaaggatgtgcatttctgacaagttcctaggtggggctgatgtactgctcacactttgtggaccaggggaggacaacggaagagaggctgaggaagggaagaggcaaagctgagggaagagaaaagggagatggagagagaactgaatgctttcaggaggaacttccttcaaataccaaacacctttttcctcataactcaacccctagtggtttctccatttccccatttcttttagtctaaactagtgcttgctaaacttattgacctcacagattatgagaattagaaaaagaaaagaaagaaatatagattttatttgaggcccctcctaggattagtcactttaaattttgcctagttaggacattcaaaaacaaatacatacctatcttctaccatgaccaaaacttcatataaggaaggacatttttaataaccaaaagtaaaatgttatgatctcaaaactaaagatagttatttaaatgaagtacatttacttctatgaaaaaagcatactacattgtccttagttttctctttatatcacagcctggtgaaaactttattacagaccaccattggctgctgtaccagcatttgggaaccactgatctaaatcaccgaaattgtaattctcagactactgcacttgtgttttcctgccagaaccatgtgtactggctctgtaactttgccacctcaggtaatcatcagttctcagagagacccttgctttttgggacacctttcatgctattgcctctatttagatggctcactgcccacctggaaagctcttaatctgttttcaaatgctgccagctccatgaagtttttctgaacctcatcatcctgcagcaatcattattccatcattggtgttcccatagcacttgctcctttgcactggactcatttatttacagatctgtcttcactatgctggaactcctggaggcctaggtccaaagcctagcaattggcagggtacctagaacatagtgctgtagtgatgtcttaataaaaaccatgaagaggagttggacttgatttaatggtcagagaaatgagacaatcgaaaatatttttattgtagtaaaaaacaacattaaatttaccatcttcaccatttttaagtgtacagttcagttgtgtcaagtatattgacattgttgtgcaacagatctcttgaacttttccatcctgcaacactaaaactctatactcactaaatactacttctccctttaccctccccaagcttttggtaaccacctttctacttcctgcttttatgattttcactatattagataattaatatgagcagaatcttatggtatttgtccttttgtgaccaaaatgttcttttagaaagatttcacttgcaggggactgcaggatagaccaaggtggatgaaaaggatgtcatgagtaatcagggacaaggagaacctgacggtagtgggggtcatgagtaatcagggacaaggagaacctgatggtagtggggataaaaactgtcagcaagaggcctagccagtctgattgttgtatccaacttttctttggattagaaacaccaagaagtcccatttccatctactttctttgtctccaccagagtgatggtcatggagccaggtggtaaaatactgcttagatgaagaattcataatcatcttggtccttgggagtgcctaggggaagctggcatcgttgcttctctgaacacgggtcagctgggagctgcagagttggcctcacataactgtgatgttggtcaaactgtttcctagaatctcagcctcctgtgtttgtttgtttgtttgtttgtttgttttgagatggagtctcgctctgtcacccaggctggagggcagtggcaccgtctcggctcactgcaacctccgcctcccaggttcaagtgattctcctgcttcagcctcccaagtagctgggattacaggtgtgcaccaccacacccagctaattttggtatttttagtagagacggggtttcaccatgatggccaggctggtctcgaactcctgacctcaggtgatctgctcgccttggcctcccaaagtgctgggattacaggtgtgagccaccatgcctggcctcagcctcctgttttctacgtccttttctctttccctctccatcaacctcttcccaagcccagtgctttgtgttctttatcccattaaaacctgatctgagaaaactatgtcatcagtcatttacgtctgagggtaaataagatatctccgtgtttcctctcacagagagtagctgcaccatcagcctattgaagaagaatagccacactgtaaaagaaattgcaagcagcaggtagaggtattttggggggcatggagtgtttcttgggcttctgaaaacatggtactagaagtcaccacctgatgacacaggctgacattggccaaagcatcttatgcataaaaggaggtcactttattcctgctcaactctggggggagatctgagatcttattttttgtaaatgtgctgtaccaataattatggtgtttctatcatacatttactctcagcttcttcttctataaaattaagaggttggaaaaaataatatctaagttccctgccagcttggacattttgaggttatatgattattggttcagtgttttttgtttttgtttttgtttttaaaagaatgtcagccagaaatattgaaatcaaattttatttttggaaaatgacattacacacatcttgcaaatgtacacagaaatgagaatgcgatgaagaacagagcttgagagccaaaataattgcaagagcagctctttggctgcctggtattgaatgctgcgaatcttcagcactcacagttcacagcaccttacacacatggcaaacttctctagacaaccttgaagtcctctgacccaagaaagccctcattgaattgcggagggggtgggggaagaggggtgttacaggcacaggagatgaaaagggtctgctccagctggtttatgggggcctcaccaaacctaccagtccaagtggggtcagcaaaccaaaaaaggagaatgcctcttgaaatactgcttttgaatcacaatttcagagtaggttaggtattgcctaggacactgatagtaatgcatttgaactcatgcccttgtttttttttctggctataactattctaaataggtggctaaagttcttaaatatctgttttatttctctcattttttctttttttttcaaataattattggtcatcggtcaagcagagtcttctgaggtctctatcttaaaacagctgcagggataagggacatcactacctactgtctttggattacatgtgattctgaaaactattcaatcctgaaatgtaatcaaatggccaaatacaaccccaatttaccactgatttttacgtaaagttgagtctttgatcacaatgctgttccttaagaaatgatcaataactgctgagagatggttgagaaatgccttttccccacattttggtttgtttgttgtttgctgactttacttggcaagagttattgggcctcaaatcagatatttacaactgtaagacaactgggagcagggagagggagagggcaagggggtgggaagaaggactacaaagaagaatatattcttttcagaggttaaaacgagttaagaaatgtgatgtacaataccatgcatttactctccaaagctagtcactagcaagctaacacctctaacactacaaccaccaattacagctgttttgctacaggtactcaattctaactacagctatagggcagaaagggtgggctgtttccattttaaactttctccctttgaaaatggccataaaaacattttctgtacaagtttaatggcacaaaaaggtgatcaaaaacattttaaagaacttaccacacgtgggaaatgcaaaattcaataaaacatgcattagttgtatacaagtcataagggatcattggcttcaagctgcaatatattacaggaccatacattggagacattttggcataacctcttacttgttcaaatcccttttggataacttataaagaaaagtcattgtaaattttggcattccatatggtattgccaagcagtgacatttccaagggctttgcactctgtttaataaattaacacctacaatctggcttctttaggtccactaatttctcttatatggactgtctattcagtatcatgaacagttggtgtcaagagtaaatgtttaggtgactcagaaggaaaaaatacatgtcaattaagcaaatgtctctttttatagtatagatttgttaaattatcttttcatttaaatcaactccgattgcctaccagtttagttaaaacagctcaacagttagcaagccccaaacaagattattatagagagtttaatgtgtaatggtaaaactttaagcaattactcccccacccccatccagccaaaacaaatgacaggagaaattacctgtggtccctcattatattatattgcagctttaaaaattatgggcacatcaaacaaaatcaattattagtatttagctgatataaatccatgggtggattttttctcttcagctgattatgtctctgagcacgcttcactgctccacaaaatgtcagactaaaaaggaaccacaaagtattctgtacagtgcttggaaggcaaagacctaaagatacatgagctataaggaaactgcttgtaaagatctgctgagggggattacgaatgaaaatggagaagaagaaagggccaggatcaggttgattcccaccaacatacttctgattggactggggtaggaccagggctgattgaatctggaaataatttatcatcagtcccaaggcaaaatcacaggctaagaagaggcacatgcccaatgcctagacagggaggaaggaaaaagtacaaataaagataataagagggagagacagaattgcacaggagaaaggatggatgtttgtactgtggaaagagagactgataacatagaatataaactgagaacagaggaaactagacagagaaagaaaagtcaaagagatacacaagaggtagagcggcaaaaagccattgattccctcaggttattgacctagtaatgagaaacgctaatgccttcaagtctttgccttacttacaaggtgacttctgttgtgccatctgacctctcccaactaacctgcccttctgatcaggagcagaaagatgccttaattaccaattggaattctatactcccctagtctcaggcatccaaggtaagaaaaaatcacctctgattccagaagatgttgaagccaataaaccaagggataaaaaattagtcttgtcagctgggcatggtggctcatgcctgtaatcccagcactttgggaggccgaggtgggcagataatttgaggccaagagttcaagaccagtctggccaacatggtgaaaccccatctctactaaaaataataataataaaaaaatagccagatttggtggcgcacgcctgtaatcccagctactcgggagactgaggcaggagaatcgcttcgacctgggaggtgaagggtgaaggttgcagcgagccaagattgtgccactgcactccagcctaggtgacagagggagactcagtcaaaaaaaaaaaaaaaaaaaagttagtcttgtcaaatgatagccaatgtcacgctagctaagccaaagcgggaggtctgcatagatccttaacaaggaaacaaggcaggacgcaacactaagagtctgggtgtataaagaccatactagacttttggagacaaaaacaatttctggggaccaggctttaggagaaagggagggaaggcaccttttcctgaagggatagatggggcaacattctcatgcctcaccccagatgagctccaaaacacttatggttcacttgggagaccagtctgggacttaaagccaaagcccttcagtgaaggcaatatatgagtaaggcctggaaatggatccaagtggccctatgtggccaaagacaggttccaatcatctttttaaaaaatcaatgccttttatttccatagcaaactggacaaccataaaagaagtcgttcaaaccactgtcccagtgtttctatctggggaagtctcttggcacagacgtttctgaggtggggtgatctttgggatcattcccatcagtgtcctggagctcattttggggatataggcatcctgttctcttgtcctagggatatggatttttaaaaaataaaagccatttagaatcaaatgtgcagggtgattgggagcattgtacccagagtattgaagggattaggaacacagacaaaattttgttcaaggtaagcaccaatcactggtctaagacttggactagaggattcaaagaagaatctcagggttccttgccttcttcaaatagctacacatccactttcaggttccttggttacttgtgactgtggaggagaaggaggaaggagagagaagtacctgaggagtggggtaagcccagaaggaggtctcttagaactgaactaataaatacccccttagttcccaggaagagccttgcagcaaggaaaaccatgtgtttggacccttttgccctggtttctgctgtggaaggccacaggagcagtgtacacaagacgatgggaagagtgtatagagcacacagcttgctattttggtgcaaacacaggagccaatgtttaacatcagccagggtacatttttgtcacaaagccccttgcttatacctggaaattgtcctcatcagagcaggatggctttggggacattgtggatgagggcaaccacagtgagaccaggttattttctctagctcatcttactcccatattctaaaagaaatcattgccagtgaatggtagccacactagtttttttaaaatgttgaaaagccatctcagaaagttaggatgaacaaagctattgttccactctttctttttctactctggaaacaagaaacatttccctcagcctggaaagaccaaccattatgagatgacacaaggtgaactgatggagaaaatcaatcttcctccattccatttgggcaaggcaagcattcagtggggggctattcagagggctcctcacgatggagcagtgatctcctgaatcagatggacaaggccagggaccccattgctcctattggccctcaatgcctcactctcttcaaggacatctgcaacccatgtggatgggaaccaggtgaatgcagggaaaaggggctgtattaggttgctgggtggatttcccactgagatcagggcagcagcatgtggctccaagatgcaacatgaccctgagaaataactctcaggagcctaatggaaggcaatactacttagtgggaaaaggccctggaataagagccaggagatgtgggttgtaaacccaatcctgccccagccagctgtgtgaccttggggaaattactttacctctgtgtctcggtttcctggcctgaagaatgagaaatttggagtagaggagtagatgatgtgatcttaaggttccttccagctagaaaacgctataattcaatctaggctaatactaaagtccataaggacacaaagcagtcatgctaatggctatcctttccaaaacagtgaagagaaaaggagcttttctctcaatttacccctagttaatactacttatgaagttagttgttcagcccagccccaatatatacattttccccttctttgtccctatttctatttctgtagggaagaaaaatcaggaggtaggaacaagcaagagatggattgtgtgtgtgtgtgtgtgtgtgtgtgtaagaaggagggagaagtatagggagtggtggcaaatgcttgctgacttgatgtttgttgaccgtgcagaaattaacacaatggaacttgagtgctaaaattggattgggtaaaattggaagtgaatgacaggggtggaggagctcagttacagacacacaaaaaaaattgccttgaaagtgggccaatttaaaatgcaattaattattggagacttaaattttggactatgccaagcctcatcccctgctccctccaaaatggccataaagaaacatttccttatactcgattaaaagtaagatggaagatgtactattgttattgaagattgttggttcaaaggttatcctaaagaaaatatatccatttggtattttctagtagtacatataccgcaatcaaggaaatactcagagagctagtgtgaggcccaagcataaggaaatctggattcttcctctggtcctgctctttaccagcctccacttcctcaacttaaaataaaggtgatggactaaatgagacctaaagtgagactatgggtggagtcattgggggttctggcctgaagtttaaaatcaggcctcccaccattctttatgcccacaccccctaatccaagtatcactttttcccaattaactacaaaatgttctgggaggcactaagaaaaccctgagcttctagaaagaaataggggcttagtaaaatgggcttattaatggttttgaatgggtctacaaaaaaaggagagggggcaaaaagagatcctcatcatttggggttcttcaatttcaccagaaaccagtactaccatcatctcacttttcctgaaccgaaaatgtttctggtagctacagacatctgaagcttgtctaggggcatctgagctaccccaccaccactgggttcccccctacacagtgcacatcagcagtgccacccagttgccaccaatccattacaggggtgtcctgtagtatttcctaattttgaagcagctgcagatgcacacacacacacacacatgcaccaccccctcccaccaccaccacacacacacacagcaagctcattccatttagagtggaggaacaactgcaagccattcagtagccaaacagcagcttggcttcgaatgctgtgcctttcaaaatatctgcacaattacaaagaaataaggaaatcttcatatctgctaaaagcaaacacagaattggcatgcatgaccttcacttaaatttagttgtctttgccattatgggctatgattacagaaaaaaaaaagcagtgttataaacctgtatctcaaaagactgaaaactatttcaaatgatcagtccttagtaaagagaaatcctttctaatgttaaagacaagtgaaagatttctgtgtcttcagtatgaaatattaggattatagataaaaagagttgcttaaaatatgctgtaacatttcatttaaaatataattagaatgtctggtccacattgaaattattaatgcaagcataactgttaaaaagctatcaaaaaactgattctattgaattggcctctgctattcatcttgttttctcctggaggttactgtttggcagtgacagcataatttctaaactacattattcttctgcttttttttttttttttggtaaattttcttcatgtgttttttagacaaaagaaaaatcaccagtttataaaaaaggagcctgaagagtttgctcctgaaatacagacatgaatttttataaaaaggatattgatttcttgctataaaaagagactgaaaggtgtcagacctgaaaacaaattctcacagtgttttcagtgttggctgttaacaaggcattcaatagaacagagatagatggataccatacagttcatgtaatcatgtggtatgttagacagccttctagaggaatcaggtatatgaagtcccttactccaaactattatcaattgcttattgattccaaattgcctcagtggagagattgaccaggaattcactgtgctttataaactcttcggaaatgtctgcagtattttccaattctgtctattctcttagctaacccagcaccaggatcctaagcatctggtgtcacaattataagttgttggtttatttctccccattgacagccagaattggtgctggacaacaaacccgggcctcaatcaggagtgaagagtgaggctggggagctgccttgctgtccttccagggtcctccaccattcttgagatccagagaaaaggggcacttgtgtttgtcattcttggatctgccaatgagttttttttttcccacacaaacattttaagtgctgtatatgtaaacagccctctacagaaggaagactgtatgggcaaaattagacagggcaaatataacgcaggcacctaagctttccattgaaaggtcatggactagcacattttgcatccctggaatgctgccccaaaggatggttatcaatctatctctcataattggtaactgtggatcagtggcccagaggagaaatcacaggaaaataaacccaacatattacaatgtgtttttcaaaataacaacaacaacaaaataaaaacttgaaagcaccaatagccctgttggacacttgagcagaagtaccctactacaatgataggcttggatttgtactctggactctgagcactctcccctcctttacatggaatcaccaagcgagtccgagtcatccaaggacagaggcaggtacaggtcctataagaagagaagagacaaagttaattttccttttcttgatatcttgagctctggaatgtctgctttagttttttttattaatactttaatttttacaacataataattatagattcacaggaagttgaaaaaatgtacagggaggtacccttgtaccaatgtacccttcattcaattttccctaatggtaccatcttgcagtttaacatgtgatcatttgtgtgtggggtgtgtatgtgtgtgtgtgtatattcctatgcaattttatcatgtgtgtatatttgtgtgaccatcgccacagtcaagatacagaactgtaccttcaacacaaggctcccttgtgctaccccattagagctccatccaaccctcccctcttccctgagccctggcaacaaataatctgtttcctgtctctgtaattttggaatttcaacaatgttatatgaatgaaaccatacagtatataaccatttgggattggccattttcattcagcataattccccggagactcatgtaagccattatatgtatcaatagtttgcttctttatattgctggtgtagatgcaccacagtttgtttagccattcacctgttgaagcacacgttgaatgattcaagttttgggctattgcaaataaagctgccataaacgctcctgtactgtacaagtttttgtgtgatcatacattttcatttctctgggacagacacccaggagtaaaattgctgagtcatatggtaattccattttcagttttgtaaggaatgccatattgctttccagtgtggctataccatttacagtctcacctcctgccagcaaagtattagtagtttggtttctccacattctctccagtatttgatgtttttattatttttcattttagccattcttgtggatttgtagtgacatctcattgtggttataatttgcattaccatgatggctaatgatgtttaacatcttttcatgtgcttagttttcatctgtatttcttcctcaattaaatgtttcttcatgattttattcatttctgaattagatttttttcttactggtaagttttaacagttattttatattctctaaataagcctttaattagatattgggttgcaaatattttctcccagtctgtatcttgtctttttacacaccttcacagcttttgcatggtctttggcagagcaaacatttttaatttttgagatccaatttacccaatttatcagtttttattttatggattttacttttgttgtcaagtctaagaattctttgcttataatccatttttaatttttgcatatgatatgaggtctaggttaagaaactttttttttttttttgacagagtccctctctgtcacccaggctggagtgcagtggtgtgatctccactcactgcaacctccgcctcctgggctcaagtgattctcctacctcagcctcccgagtagctgggattacaggcgcccaccaccacgcctggctaattttttatacatgttatcagtaagataccaaagagaactggaaagtatagaatcaattctgtggccacttaagagcacccccacccccaccgccttgccactgcttttgtatcataaggacaagaacttcagtagaagattgttcaagaaaattggagaacatagcttctccttgaggtagagaaaaaagtggaaatgagaaagagggacaagagtggggaggagaaggacttatttatttaacattgggaatttatctaacattgaaaatgctttttgctgagaaagaagtgacaggaaaacctgtaggcaccttagaatggaaagacgagtaaagcatattcagaaacccgaggtttaactctggctaattaatgctatgacattgaacaaatctttgagtattggtttctttatcagtgaacaatctgtaaggtttcttccagctctgagactataatttgggggtcctaaagggatattgaatgattaagaaacaaaacaaaggcaactacagcaaatagactcagttctcgtcaacctaccatcccttcactgtaagtcagggattagcaaaattttctgtaaaagattagatagtaaatattttaagttttctttgctggtcacatatggtctctgtcacacattcttcattatttgtttggggtttgctcttttacaactctttaaatatttaaaaaaacatattttagatggggtgggtcatccatgcaaatataaccaagacacaggcaggatctggcatccctgttctaaactaccaaacaaaagtttcttagaaaactgataaacaggtaggatgtacaatgccaaggaaatactagaaatgcaacaaatacatgtaaaatggaattgaagcaaagtggcatacaatggagttgcatctctgaagggattaattctgaagtactggagtaaagtgaacatagtcaaaagtatttttgagctctggacttccagaaaggtggcataagcccctctgaaaatctgttcctcaacaaatgcagtaacactggcaaaactgtcaaaattaactttttcaggactctaaaaatcaaccaaaagcttgcaacaatccaaacagtgttgaagaaaaactgatgaatcttgtaaaaatactaagatttttggtgtttcaacttgccttatttccatttttcctctccccagctccatggtagccttgaaaaccaacagtcacaactactgtaccggtgaaaaacagcaatctagtagttactggaggacacaattgggggtttggagctccccaaagaactcattcccagagaattgtcaatctttgacctgtggggtagctccctggaaactcccatttgctaggttcttctttttttaacctgactcagagcacactcgctgtgaacagccttttcagggggcattgatcagttgcaattgtttaaaaatcacagccgtatgaggaagagggcaaaagttggagcaaatcaagctgctgaaaaccttgaaaggaaaaagtcatagaattatgtgcctataaggatctttgaaaagctcagacatattcctgggaatctagaaggtcaggcacaagttcaggactgggtatattcttagaaaagaagcgagatggccctaatctttccccattgactgaccctgaggccctgtgcaagcggcaagagaatgctaagatggagttgtaaactgcctggcagagcattgaaatcatgtcccaacacaggaacagagcccctcggcaaaggctgggagtcttactggatcaaggcatttaaggtaagcaaacaaaactatcctattcattcaaaattatcatcacaaataaaggagaaattaaaacattccctgatagaaacacagaatccattgctagcagacctgtcttgcaaaagaatactaaagagaatcatccacagagaaattaaaggacactagaaagtaattcaaatccacataattaaaaaaaatagtaaatgcgtaagtaaacacaaaagactgtacaaatttatttttgtaactcttttcttcttttttaaaaataaattttactgtgtatatttgaagtttgcaacataatgttatgggatacatatagatagtaaaatagttactatagtgaaacaaataattacttttttgctgacaagagcagctaaaatctacttactccctaatacaattttattacctatagtcctcatattttatattagatctctagatgttcatcctacatatctgttattttgtatcctgtaacctacatctcctcatttcttccctttctatccccggcttctggtaacctctgtgttattctccatctctgtatatttgaccttttttttttttttttagatccctcatatatgtgagattatacaatatttttctttctgtgtctggcttatttcaaaagacaactacatgaactagatgaactagtaattataagaatgtgttgatggacttactatgtataaagatgtaatttgtatgtcagtaggagaaaaaaggagtgggaaagaaacagagctatgctatggcaaaatttttatatataatttaaatcaagtttgtattaatcttaagtagagtgtattaaaatgtaaattgtaatcctcagggcaaccactaaaaaagctactcaaaatgaaattagtaaaaatacaacaagtgaattaaaatagtgcactaagaaatatatttaacacataaaaggcaagcatcaagtaatgaacgaaaaatgatataacatatatagaaaatcgcaaaatggtagatgtaattctcgctttaccagtaattacattaaacataagtagataaagcaatccaattaaaggcagagactggcaaaatagattttttaaaaacatgatccaactcaatgctgtctaaaagagaaacaatttagattcaaacccacaaatatgttgaaagtaaaatgatggaaaaagatttgccatgcaatcagtaactaaagagagctaaaattgctatactgatgtcagaaaaaaaatagactttaagacaaaaattattactagagacaaagaacattttataatgataaaaagagtcaatatatccagaaaacataaatacaaatatttatatatcttaacagagtaccaaaatacatgaagcaaaaactgatggaattgaaaggagaaacaaacaattcaactatattaggtgaagacttaaatatcccactttcaataatggatagaacaactagacagaagaccaacaagtaaatagaggacttgaataatactataaacaaatacacatctatggaatattctatccaacgagagcagaatacatattcttttcaagctcccatggaacatcctccaggatagatcatatgctaggccataaaacaattctcaataaatttagagggatttaaatgatacaaattatattatttggccacagtggaattaaattagaaacaataatggaaagatattcaggaaattcatatatatgttgaaattaaacaacgcacagatgactaaccaaaaaagaaatcacaggaaaaatcacaaaataccttgagataaaggaaaatgaaatcacaacacaccaaaacttataggattcagctaaagcagttttcagagggaaatgtatatgaaatgtttcaaatatgctatcccatagaaacagaattgattagtggttggttgccaggggttggatgaaaagggaaggggctgcgactgctaatgggtaaggggtttattttgagggtgatgaatatgtcctaaaagtagatagtggtatactaaattaccttaaaaaccaccaaactataccctttaaaaggagtgaattctatactatgtgaattatatctcaataagctgttatttttttaagtacctttgaaaatcctttatattgacaattaagtactgtttatgtgatttctgaatatgcagccgtacacagcaatatgctgtacatatattaatatatatgatatatacatatatatatacacgtgtatatatatgatatataccatatatacacgtgtatatatatgtatgtagtgatattcaggatgtaatgatgtgtacaaatgtaagagaaggttttatagttgttcgctctattactatgttatgactattgatgaattccattaagttaaacttgcatatgatgaaacaacactgtaatataaaaagcacaggactaagagtctggagacttagattctaggcctacattttccatttaacttcccttttcagggtccttgcttctagatcttaaaattgaggaagatctttaaggttccttctagttccaaaattctataaactgcaatcattctatctttttctttagttaccccaaagcaagagaaatggtacagacattgccaagttaatgaactccctgggtatttttcaggccgtacaaaaggaccttttaataatatggaggccactttgagtcccagcacactgaaccactgggctttagtattattcatgtaacagacccttcagtggagttgcttggttggtggaaaaaattatctgagaagattgttccagacctttatctcagaggaagcagggataaggcctgagggtagaatcctgaagagatttcacttgtagctgctgtgagactctgaattaatggcgtgagatgcagaagatggagagaattcatagaactaggcctaattatgaacttctgaacactgtatctccatcaatttatttcgtattcagaatgtattttcctgtatgggtagaacaatgttcaggaaaaggaattatctcaacattctgtttttgttgattgatatgtagaaatacagaaacacacatattgcttagcaatacaaataatttgcacctgaaattcatttgcttattcccttggagccctacagaacaaaatgtttgtaacaaatacagctgtgctggcgatactattgtattagagaaaacaaaaagttggtctctggtccaaggagcttatagtccaaaggaagtcagggaggagttttgagaaacctggcttctagtttgggttttctatttcccaaacgtgccctgtgcttttatgatggtgtggttttgtttcttgctaatttttttttaaagctggcatgcctgttctcttcaccagccacttaaatgtcacctctgtgaaaagctttccccatctcccactctctcccgtctttcccaccctcctttgtgctcatgcagtcctttcgttagctcttgatcacactacccaaagccacttatattagagttagttgccttctgtgatttaagggtcaggaccctactttactcatcaaagggcctctccaagcacgtataagaggacaaaagaagtctggaaacagaggaaagtgcatatttaaataatgttatttatattttcaaataatatgttgaatatactttcctctagtctctagacaactttgcatacaaaatgcctctaaatttcaagccattggtgcaatcactgatctgaaaatttaaaaattaaataaatgaaagagtttccttacgtttctagattttttttttttttgaaaatctttactatgtactttcttcaaaggggatccttaataaatttttgttgaatcacactgggactgtctttcctctgtacctctttttttctcatctgtaaaagggaaatgctatctgccctgtctctttcacggggatatcacaagggtaaatgataaaatggctgtgcgatagaaaaaagcagtatgaaaatgcaaaatgttgttctcattaactatccaaggatttacttcgtgtccatattgtaacacttaagtatgcggactttggctaaccccattgcagctgcattaaagaagattctccatgaactgcttaaaagaagaagccaagaagctgattacagcttagggccccaccacagccatcaaaaattaccaaagggatgctgggacttcaagttttttccagttgtgcaggaggaaagtcatggcctcagccatctgcttcctgtctgcatcatgactcacatctttcaggtccacttggacagaagttcagatgagatctgctcaggcctgctgcccagagacttgatggtgctaaggttcaggtagctgtgtgaaaggaggagcatgaatctaggacctgagacctagggggactgagacagggtcacaagctttttatcttattcagaaaaaccagttcaatcttcattactggtggtgtaagcatgacactattgcttcttgataggatgcactgaaaggatacaacatcactcctatgatattcctgccccaaattcagaatctgaatctaatcacagagaaacatcagacaagcccaaattgaaaggcgttctaccaaataactggcctggaccttttatttctataatatactgtactgagagatagagagtctcaggaacttttccagattaaagaagactaaagagacatgagaacttgcaacatgtgattctagactggattttggaccagaaaaagaacattattaaagcaattgataaagtttgaatatggactgcagagtatataatagtattgtgccagtgttaaatttcctaattttgatgatcatgctatggttatggaagaaaaaatccttgttcttaggaactacatactgacatattgagggataaaggggcataatgtttgcctgtgatattaatctcaaattgttcagaaaaaataggcccagtgcggtggctcatgcctgtaatcccagcacttcggaaggccgaggcaggcggatcacgaggtcaggaaatcgagaccatcctggctaacacggtgaaacctcgtctctactaaaaatacaaaaaattagccaggcgtggtggctggtgcctgtagtcccagctgctcgggaggctgaggcaggagaatggcttgaacccgggagtgcggagcttgcagtgagccgagatcgtgccactgcactccagcctgggagacagagcgagactccatctcaaaaaataaataaataaataaataaaataaataaaagaaaaaataataacatgtactatatgtatttatttgtgtattattatgtctacatatattatacatagagagagagaacataaaaaataagtaaatgaggcaaaatataaacaactagtgaatccctgtaaagagatacataagttgtttattatttttgcaactcttctgtaagtttgaagtgatataaaaataaagagctttaaaaatagtgagaattataccaaatttaaatgtttactttatttaaaagcttgctctagaaaatgatataatgtattacttaacatttgcttgcttaactgtctttaaaaagagtaattttaaaaataaaatgaaacactgaaaattccacagttaagaaaacagtgaagctctgacaatgctgccacctgtgagcttgttctagtccttcaatggttagaattgagtcaataaacaaacaagctataagtgtctgcaagcccaaccaggaaaaatagtttaacaatgcaaacaactcaccttggtgggcttgtggatgatgggtcctcagcataaatgacctgaacatgtcagttgaaaaactgaataacttgagtgtgcagaacaaatgtccaagctgccttcacactttagggaaggtaccaatggaaggtgctagggtaaatcatgcttaccaaaaggaaggtaagggcagaaaggcatataggaggtgctgtgtggacagtggaacaacagaggtagacttcctatcttggcatgtccatatttacaagctttactgctcagcaaagaataactaaaagccaactgtaaaaataattttcatccatctcataatctctaggtaacactggttacacagagttcagcaaatacttctttggtaaaatgaaatagctcaacaggacaatcagaaagttctggaaggttcaatagcagaagttaaaggggccattaaagcaatggaacagacattagaaattatggggcaggcagtagccagattagccaggaaattaaaagactgatatagaaaaaataaaatgaaaatggatgtcgggcagtggtatgctattaaatgtttagcaactggctgtgagaaaaaaacaaccttgacttatagtatttgttaatgtccatggtgtaaatattcccaccatggccaaattcaagttaaaaacgtgatgtcactcaatacagagttgagaagcaatgtacacaatcagctctcaccacctactgtgagctggctctggcacaccactggtggtgacttgggtaccactcttatagctagatatgttaccctagtaagtaacttaaccttttggctctcaatttcctcatctgtaaaatgtcaaacctcataagattatttagagaatcaaataaaactaatttatctccatctaaggtgtcttccagctctgaccatctctgattctgtgatgcagttagtcatattggtggctttttgccttttaccatctcacaccaagtcttatgagcaggagaaagattagagaaggctagaggaagttgctccacagtatggtaatcagagaagaagccacatcaacactgccttaggtataagagattcaaggcagtaaccactccacattttctacacagagatttctgggtgagaatctgtttggatagcggggctagggaatttatgtgcttttgttatttaatgatatacttatttggaatagtttaaggggtatacatggtggccaaggccaatgcaatgtgtatatgtgctctcttcctattcagcatcagaatctgcctggtaatgaaaagtgcacagcaaaagtaggagctattcatttgttgatgtccagtaaatctaaatggagtaagtaactcagtgcaactttttgggactgctatctttgttatttccactgactggtgcctggtgacataaagtgccctgaacaccccctttgctatgtctctgaactggggagacaagtgttcaacccatgtcccaaagcatggtttggttacctcattagctttggagaccttttggaaaccctttggaagaagtgctagaatgtagcaggaaataagtcaggaattggaggaataaataaaagtgactagaagcttgctccctgcttggattcgcagaacttcaagctaatgaagccagatgaagaaaatttctggccttaatgtgctgttgagttagaatggaagagaaaaccttcaccaagccattcaggaaactgagtgcaaagaggtttagtaaggtataagagacataataccttgtgcttccggaggctgccaggactggtgggcgtagagatgggagactgcttagacttgggggtagagagctggctgctggaggttccgtttgctagcccaaagcaagagaaaaggaagggataaaaatcaacagcatacaaaggagcaagttatccttcccctcagaagacactaagaacattcaaacaaggtacacagacaaccaagtgatttggtgagtagaacaaaggtgaaaagaaacacattcctcaaaagggcaagaactgcaatcctcagttaattggatccctatgcagtgcaaggccgtcatcctcccaccctttcctcctcagtgcttcccaatcacaggggtctgtttcttttcaaacatttttcatattcattcccaggtttgcccctaacatctctgggaggtagtctgggaaggtattattttgctttaattttatagaggacaaaagtgaggcacagagaggttatgtgccttaccttaaaggggaagaaatatgggcaatttggaccagtgcacatttcctttggtgccagatgatggggtaggtgaaagacagccccattgttagtctctccccctctcttttcctgctcatgccacaccattgtgcctttcctacctcattctgcatgtgtgaaaagaacaggaggaaagaaagagaaaataggctagtcaggaagaatgaaagagacagtggaggagaaacagaaggtgaaacattaaaagaaggctcaagcagcagaatgggcagaggagaaaatcaaaaaagagagaatgacaaagagattgggaatggaggagaaaagagacaaggaagatgataagatattaaaagagaaggaggaagttgaaacaggaagaaaggcatagagacacataaagatccaaaatggtagccagagtcagggttcacccacatttggctctagccaagaaaatgctgaaaatcagagtttctttttaaacatctttatattctattgtgttgctaaattgttttatattcccttgctaatgagctttttaatatccaatcatgaagaaagaaaagtggaatattaaaatggaacaattaaacagctttcaaagtggattcttgttcagacacttcatactaaagtattttttttttaatcttaagacctaaattgttaaacagagatattctaaaatgtgctttaaaaacaaaggcaaatatcctgagggtgtgtggagagtgggggagaggaagagagagggggagggagaaagagtgggggggagggagacagagagaataaatagaaaattgaaaacattaagcagaaagatggcctgatagtgttcctgtcagtcccataggtaaagcttaaactgctgtatcatgaatatttcctgaggatacattccttctgcaccacttatggaaatatttccctaggttctggaacatgcacatcaactgtagagatggaagagacatcagtgtagtggttggtaagtttatttaagcgcaagtgagctgaaaaatggacacttaagcattcactgtctggcttatatcctcactcatctctcacccactcgttgagaagccctcctccctgtcattctttcatttagccagtagctatggagctctacctatgagccaaacaaagtgttagacatcaaggtttcagagaggagtaagctacttcctgggggaggcaggcaagaattcagtgaaataaacgctaagacatagccttgcatagggtattattggaattcagagaacagactttgaaatctggggcctggaagacaaacaagaggaggcaacacctgagaaatcttgaaagatgaatctgaaataggcaaatcaatagagacagaaagtagattaatggtttccaagggttggaggaagggcaggagtttgaaagtctgctaatgggtacaagttttctttggggaaggcaaagattctgacattaaatagtgatgatggttgtacaactctgtggtcaaactaaaacccactgagttgcatatgttaaattagtaaattatatgttatgtaaattgtatctcaataagcccttaaaaaaagaagaatcagagatagaatcattcccataacaacacataggcagagaggataggaagggtattctaggcattagaattgccaacatcctttcatgttaacaacccacaataatctaggcattgaaggaacacacttcaaaatgttaagggtcgcaaaaattttttcccatgttgtaggttgcctgttcactctgatggtagtttcttttgctgtgcagaagctctttagtttaattagatcccatttgtcaattttgtcttttgttgccattgcttttggtgttttggacatgaagtccttgcccacgcctatgtcctgaatggtaatgcctaggttttcttctagggtttttatggttttaggtttaacgtttaaatctttaatccatcttgaattgatttttgtataaggtgtaaggaagggatccagtttcagctttctactcatctgacaaagggctaatatccagaatctacaatgaactcaaacaaatttacaagaaaaaaacaaacaaccccatcaaaaagtgggcgaaggacatgaacagacacttctcaaaagaagacatttatgcagccaaaaaacacatgaagaaatgctcatcatcactggccatcagagaaatgcaaatcaaaaccactatgagatatcatctcacaccagttagaatggcaatcattaaaaagtcaggaaacaacaggtgctggagaggatgtggagaaataggaacacttttacactgttggtgggactgtaaactagttcaaccattgtggaagtcagtgtggcgattcctcagggatctagaactagaaataccatttgacccagccatcccattactgggtatatacccaaatgagtataaatcatgctgctataaagacacatgcacacgtatgtttattgcggcactattcacaatagcaaagacttggaaccaacccaaatgtccaacaatgatagactggattaagaaaatgtggcacatatacaccatggaatactatgcagccataaaaaatgatgagttcatatcctttgtagggacatggatgaaattggaaaccatcattctcagtaaactatcgcaagaacaaaaaaccaaacaccgcatattctcactcataggtgggaattgaacaatgagatcacatggacacaggaaggggaatatcacactctggggactgtggtggggtcgggggaggggggagggatagcattgggagatatacctaatgctagatgacacgttagtgggtgcagcgcaccagcatggcacatgtatacatatgtaactaacctgcacaatgtgcacatgtaccctaaaacttagagtataataaaaaataaaaaaaaaaaaaaaaaaaaaaaatgttaagggtcatctacaacaaacctatagttaacatcatactgaatgggcaaaagctggaagcattccccttgaaaaccagcacaagacaaggatgtcctctctcaccactcccttttttgttgttgtttttgttttttgagacggagtcttgctctgccaccaggctggagtgcagtggcgcaatctcggctcactgcaacctccacctctcaggttcaagtgattctcctgcctcagcctcccaagtagctgggactacaggcatgcaccaccatgcccagctaatttttgtatttttagtagagatggggtttcaccatattggccaggatgatctcgatctcttgacctcatgatcctcctgcctcagcctcccaaagtgctgcagttacaggcatgagccacttcgcctggcccctctctcaccactcttattcaacatagtattggaaattctggccagagcaatcagtcaagacaagtaaataaaaggcatccaaataggaagagaggaagtcaaactatctctgtaggtgatatgattctatatctagaaaaccccatagttatctgcccaaaaactccttgatctcataaacaatgtcagcaaagtctcaggatacaaaatcaatgcacaaacatcactagccttccgagacaccaacaacagccaagctgagagccaaatcaggaatgcaattccattcatacttgttagagaaagaataaaatacctagcaatacagctaaccagggaggtgagagatctccacaatgagaattacaaaacacttctcaaagaaatcagagaagacataaacaaatggaaaaacattctatgctcatggatagtaagaatcaatatcattaaaatggccatactgcccaaaacaatgtacagattaaatgttattcctatcaaactaccaatgacattcttcacagaactagggaaaactattttaaaattcatatggaaccaaaaaaatagcccaaatagccaaagcaaggataagcaaaaagaacaaagctggaggcatcacattacctgactttaaactataccatagggctacagtaaccaaaacagcatagtactggtacaaaaacagacacatagaccaatgcaacataacagagagcccagaaataaggccacaaacctacaaccatctgatctttgacaaagttgacaaaactaagcaatagggaaaggactccctatttaataaatggtgctaggataactggctagcaatatgcagaaggttggatctcggccctttccttacaccatatacaaaaattaactcaaggcggatcaaagacttaaatgaaaaaccctggaagataacctaggcaataccattcagcacataggacttggcaaggatttaataatgaagacatcaaaagcaattgaaaaaaaaaagcaaaaattgacaaataggatctaattaaactaaagagcttctgcacagtgaaagaaactatcaacagagtgagcagacaacctacagaatggtagaaaatacttgcaaattatgcatctgacaaaggtctaatatccatcatctataaggaacttaagcaaatttacaagaaataaacaaccccattaaaaagtgggcaaagggcatgaacaggcagacacttttcaaaagaagacattcatgtggccaacaagcatatgaaaacatgcttcacatcactaatcattagagaaatgcaaatcaaaaccacaatgagataccatctcacaccagtcagaatggctattaataaaaagttggccaggcacggtggctcatgcctgtaatcccagcactttgggaggctgaggcaggctgatcacaaggtcaggagttcgagaccatcctggccaacatggtgaaaccctgtctctactaaaaatataaaaattagctgggtgtggtggcgtgcacctgtaatcccagctactcgggaggctgaggcaggagaatcgcttgaaccagggaggcggaggttgcagtgagctgagatcatgccactacactccagcctgggtgtcagagtgagactcggtctcaaaaaaaaaaaaaaaaaaaagtaaaaaaataatatgctggcaaggttgtaaagaaaagggaatgcttatgcactgctagtgggagtgtaaattacttcaaccattgtgaaaagcagtgtggtggttcctcaaagaacctaaaactgaattacctcagtgtaccctaaaacttaaagtataataataataataataataataataacaataataataataataaaactgaattaccatttgacccagcaatctcattattgggtatataccccaaggaatatgaatcattctaccataacaacacatgcatgtgtataatcattgtagcactattcaaatagcaaagacatggaatcaacctaaattcccatcaatgatagactggataatgaaaatgtggtgcatatacaccatagaaaactatgcagccatgaaaaagaacaagattatgtactttgcggtaccatggatgaagctggaggccattatccttagcaaactaacacaggaacagaaaaccaaatacttaatttcccacttataagtgggagctaaatgatgagaacacatggacacaaagaggtgaacaacagtcaatggggcctaattgagggtggagggtggaaggagggagaggatcagaaaagctacctatcaggtactatgcttattacctggttaacaaaataatctgtacaccaaactcccatgacatgcagtttacctatataacaaatgtgcacatgtatccctgaacctaaaataaaagttaaaaaaatgcaccagcagggacaaagatatgaatgtgtgagagaatacattatgtttacagaagtgcaagtaactcataatggctcaagcacagggtgccagcagagagtttcaggagatgaggctggagacagaggataagggtcagcccctgggggcctttttgtgtagcctgttaagaagtttgcatttggtttctgaaggagagtcacagaagaattttaagctgaaagtgatatgatcaaacttgcattttaaagctccagctgctgtggttggttaagactgagggtagagtgggaaggggtagggtagaagcaaagaggttggttagaagacattgcactaatccaggtgagggatgatgatggttcactaaggccacgggggagggagagaatgaacaccatggtagatagggacctagaggccagataagcatagagtagtgtgtttatataccatacaaccacccaaagaacatacatacatacaaccacccaaagaacatgacctgtgccaaatagcaccaagaatgtgggcactagactttgtcaaggcactaggctttttgtgaataacaaatgcactttggaaaaggcaagagtctgtggagtcgcaatggggcaaagcagtcaattactctttgtaggaaatgaaggagttaatagttgaaacagttaatggaccacctacagtgcctgagggcttccccagcaggacctgacctgtcgcactcaaggtaagaagcaatcttggagacctatatgagctgacacaatagaactcttccaaaagagctgtgacctcggccataaagtctgagtggtgggcaaccccggtaagttctcctctggcattttgttttacatgattgctatatactttacagattctagtgtcccagtatttgttagccaagctttatagcctctctatatattctctgcatatgtgtacgtttatatatgttcccaattcccctccacccattactctcccttttaaaattaagaattaatcttaagctgtctgtaaataaaggacttaattttgtcatcaacattcaacaagcattttggaaatcagcttttaataatttaactaccattcacttcactgttgtaaaaatgcagacactttgtcagacgttcccagagttccctggtagaatgaaatccaaaagtggacatagagaaattaagtaatgtagacttgcacagttaaatgtagattcattacaagctaaaggaggccctacatttacagactagataaaatgtattcaagtgcacactttgtctatggattctgtggggaaaaaaatctggaaaggtgccatttgacatggattctagagccaattcacataaatgtcaagtaaaagaagcagcaggaaataatacaaatagggtctgatgaactttgtgtccttggattggtaaatccatgtagatccacatttcattttaagagtggctggaaatggcaccactgtttgatatccttcattttcctttattcttctttgctaaccatccttagctcttgtctctgagctttcatttctaagcggcaattaggaaatgccttggtggatcttctccttaacttgtctctctttctcatttcccttctcagaaccacagcattgtctcactgttctgaccttttatttatatatggtacaaattctctcatctctttcaactcttttatagtccatttttccccttggcaacaaggggcatcaaaaacttttctatctcctaggccaccttttcaatcttatcaacaaaaataggataaaaattactctttattgagtgtctatgatgggtcaggcactcttctttctctctctttctttctctctctctctctctcacacacacacacacacacacatgcacacacatgttccagctaggggtagcaaacacaagatttgaatgtaagtctctttgattccaaagcctatatggtttttttgtttttgctaacataggctctttaaaaaataataataataattgcttctgaaattccttcctgtgacaattttctgatggaggctagggaggagggtgaaagttgtggctgagaaaagagaaagtaatgaaaagaagatagacaccagagctgacacccatcttcagggcttctatactatttgtctggtttagatttagaaagtggttagcaagagctttctttcattcaccgaaccagctgggtatcatacacagtgtcataaaacaatagcagacagagcattagcatgacatgtaactaccctcatgttacagagttctctgggaagatagtatctatgccctgcctgtcaaccctctcagttggtgcccttcagctacgcagcacaattgccaagcttggtcctgcagtcttggttcactggctcctctgaatgattatgcctgttcttgcctttgtactcatctttagctccttggctctgtctgcctttcctgtcagaatggaacaggacaagcccaaacaggatggttggtaaagaaactaggctgacttatctagatttacagagatttaaatatatgggggaaaatgggtccctgggggatgaggaataaggggtatgtgtgtggatggggtagggagaggttagttcccaaagaacaatgagagagtccagtttttggtgcgagtggccaaggacagagtggggtcactagccaggcagagtggatgctaaactcccaaactgtggatacccttgtctgggaggctggaccaattcctggaaactaggaagcaactgagtacaagttgggcataagaggccccaggtgtagcaattatagagctgcctaggcagcaggttacatgagtcattatactttctgggctcaagtttgcatgaccagaatggtacagaaaataaagggacagcttggcatctacttttctcccaacctttgaccacagaccaaaccaagttaatgctcattcacttagccctggctttccctcccatcctaagcccaacatttgagcccaactcaaaatcaagcctcgtggtttttatttgatgtcattttgaaatattgctcattgaaaacaaccccagtttatcaaaagagctatgataataatttcagagccctttttataatttcagctgtttttctgcagttatttttagagcattttaccatacatgaactcacattattctcctgatagctctaagagatggtggccaggtattactagtctcctttcaattaacaaggatataggggctcagagagggtatggcttgcgtaaatggtataaactctgccccttctcactggatagtggcttctggacttgctcacagattctatttcaaaatttccttaaagttagcacaccacatacctcccactgtgaacttctagtgattcattttctgtcttgtgttctgtaactccctaatgccttgcagagggagatctcaacacacaattctgccacttcctcatttttctcatactgagatgctctaagattttattcattccagtccaaagataccttgttttccccttacaaatagagggaattttcctggaaggccatccaagtggatccaaggtggtttcaacttacttcagaacaaggtgaagagacagaccctgtggttttcacaaatacattccaaagagcccttgggcagggtgtctggattgctttggctaattgtttctgctcaatggaaaagcttttgtccctctccctagacccatccattaggggagcaagaactgagagcctgggaatagttcttcaatgatttgatcatagggtttgctctcaagccaaattcaattgtaggttgtgagacactgtaacttcagaagatggaatttgaattttaaatatatttcctacggaatcttggacagcatgaagttatgaatcctttaaataagggggagaagtaagagtcttccttgttacaaaacaaatgtatatacccaatcctgcaatattttgacacagatgagtttccctcaagaagaggacatctgtagaggggctgatggaagtgccagaattgttttctcagggttgacaatgctgtcaacatttatttcctactgagaaacagaacatgtttctggtggagctagcctgttgtcaacgctgactgctggttttcctggtgcagggactaggataaactgcactgttcttaatttgtgaaaagaacacaggctttggaatcagtcaaagttttaaatcctggcttagccatttcctagatttgtgatcctggggctaacctaacctctctgagtctcagtttccccatctgtaatatttgaataataattatctcaattgttgctgttttgatgattacatggcagactatacataaaatgcttatctaagtgcctgccacatagaaaagagttcaataaattgtattttctgtcaatattactaccaccactactagcactgagtaagtattcaatttataggcactgagttaggaaatcctagcccacaagagatgagatatcattctatgtaggctgagggctagttctttggctagttggtcaagtatcagataatcgaagctttccttaggtgaagcctattatttctgttttttttttttttttttttttgcattttactgctgtgctccccaaagcaaaatgattggccctatcctgttctctctttttaccctctcagcattattatggcaggggaagctgtgttggtcaatgaacagtgtggagccactgaaagttttggagcagggaagtagcacaatgaaaatggtgttttaggatgagaaatgtggtggcaccacaccacatggataagtggacagagatttgaagcagaaatattgctaaggagtctgcgaaataatcgagacatcaggtcataagagaaaggaaaggactgctgtataagtcacatggagatggttcacatgtccaacaatgataacaacagcacacagtgggtatgcaggattaatgagtgggaagtcaaaaatagcaccagggtgttgaacccgggaagcatgataattctattgtcagacaaagagatgggaggtggaaatgcttttgatttttagatagcttgtatttgtcacatataagccatatacacaggattgtttagtaggcattatgggtctgacatccagaaggaagatcggggctggagaggtagagttaagagcctcctttgataagccatattcatcaccacctctgcccctttgttcatgcttccctgacagccagaagtatccatctccttatcaatttacatatagcccttcttcaagttccagttctcccaggaattcctcccttagcaccttagtccctaatgagctctctcccatgaactccaatagttcccataatacttactaccagtatctattatgcattttgcatttaaataagttattaccattaacatggcattaatggttcagtggttaaaattgtggactgtggagtcagattgcttgggtttaaattccagttctatcatcttactagctgtgtgatcttgggcaggtcactaaacttttgtatgcctcagtttcttcatctgcaaaatggggataatagtaattgcctcacaaggttgttgtaaagattaaattcgttaatacaagtaaagcgattagaacagttgcctgacacataataggagctatataagtatttgtaaatatatttttaaaatttacatgtatactggttacccaaataaatcataaatttcttagtggcagggaattcatcttaacatcccttttcttcatagcacctagcactactaagtactttagaggggtactttgcacattcagttgtatgtaaacacaagtcccaagccaagactggctgataagactcatgtagggaaatatcaccatataccatgcactatggggtgctcactggcacccactatactgcttgctccaatcattttctaagcaggttttagaagaatcagattggaggaggaactggggaagtttttctcttcccacagctctgtcaaggacaccacttccctttggagttgctggtaggggagctaggggagctgaaggaatgtctaagctgtcttgtttcagtgctctgtagcactgaaaggcacctaattacttgtgggactttgctcaaagcagcacaaaggaaatgacacagacaccaacccaccccttgcctttccacctccctagcctggagatgggagaaggggaaaagaagccaagaagcaaggaccatccaacgtagacctttgcattcaccagacagcacatcccacatactaactactgtgtgtcagtgggacactgcgaataatgcttgttgggaagtcaggagagcgatgttctggctcttgggtgctaagtaatgtgtgacatggaagatcccaagatcctaaactttgtatcttagttccccaatgaaaaaaaaagataattatcaatttccaacttaattcatagtgcaattatgaggaacaactgaggtaatagatttggaaatattttgcaaagtgcatagcatctaattcacgtaaaaagattgttatcatgaatctctcttagctagagaagaaaggtattcttgtgctgtttaaaacagtagccaatagtcacatggctgttgaacatttgaagtgcggctagtcagaactgagatacgttgtaagtgtaaaatacaactcaatttcaaagaatgtgtaatttattacattaattatatgttaaaatgataatatcttgaatgtatcattatatgaaatatgtcaaaattaattttgcccattttttaactttttaagatgtggctactagaaaatgtaaaatcacatacatgatttacatttatggctcacattctatttctattgagcagagctggtctagacagtcactttcaggaaggtcagaatgaccaagtccctctatcttaggcaacccaaagcagcctactagtttcagaaaagaaggaccctgggatacaggtctttcatgaaccctgctgttttgtgtcccttgacctccccttctaaaggctgtatattttgttagagaaggctttctttcttatgaatttgggaacggaaaagatcggactttcagaaataggtgcacatgagttgggggaaggggaatggagaacattggattgctacaacaatgacttactgttgaagaatagcaaactaattatcacattacaattctctcagcctaccagggtgggtaattagcttccttcgggggctccttaaaaaaaaagaaagaaagagaaagattccttcccagcaactagctattttgtccttttaattcaattcaattcaactggggacaaagttacataaagggaaaattaacacattaatggctgaaatggaaacagagagagacatgtctttctttagttctgaagccaggcttaccttcgctcatcaaaatggcaagtccggggttaatcaaagtgtggcactgcataagcttttttcaaatatcccataggagcctcctgggctcagattttatcttttttaccacagttccatggcctgatttaaagacagacatagctaatatgacttggattctaagagtccatcagttctgcccggtgaaaatgagctccttacagaaatattatatagacaacaaaatccttacttaacttgagtttagggcttagcaacagacattccatttggggcaaactcaatattggcagaagtgaggattgaacttgaaggaaataaagtagaaggatttgatttattcatggggcagaacaggaaagggacaacttaaggtctaaagactaaggaataaagaatcaaattatagcacaaattacagaccaaatagcatcaatttactaaacctcaagtcagaatgaacctagctattaactgaaccatgaatttgaccatatagatatagatatagatatctagcaaacttgttcaaaccagaatcaaacctgtatattttccaatgaagtagaacatcaaaacattccttaaactgaacctgaacccagccaatgtttcatttggttagaattcctgctaaagaggagcacttttggtctttcttttgtcttcaaaggaagacaatcttccattggtctatcttccatagacttggattctaagagtcttttgttactcaggttgaaagaagttttataaatctgttcacaagttccacatccaagactgactaacacaggatggaaacagggtggtactaccatgtcctagaaatgaacaaagcctgtttgccccacctaacctattatcatttggttaagtgtattttaacctctacatgtccctggctaacagctaaaaaaaattgacattttatgaaacaattgttactttttaaatctcaaatgtctgtaaggagaaatttatgccatatgaaaagtatgcactgtctatagcttatcattctggttatccgcttttgtttctgtgggagctattttacaactctgtaaattgtaaataactgataacaatggaaaattatccttatctatagagattcaaattctgaattatctaacgatgatatcgaatctcagaaaaggcaaaaatcttgcacaaatcacaaagctaggaagtggcgtagctgggacttcttagagagtcatctccctctcctctttcatatcttaccaatctcctcgtcccagcttggaatggtcctgagtgaggtggaagtggagagggaaaatgggtatagcaaatccaaactttagctaaggtactgttttgcctgagatcagctttgcccttatggaatgttcactgaatggatgccttggactaggctttaaacaaactccgatgaaatgggcttggttatgttacagcccttcagggttggaatcatgaggaggctatagacacattatctgagatgagcccaaacattctggcaattgccataaagattgtctagactagggtttgacttcatttatgttcatgaacatcagaatataaatgaatattccaattctttaaactgagaacaccatgttagattggtggtaggaaacagaggttatttgtaattctgctatctgccaagcaaattcccctcatacacccaaattggttactctgtttatcgtgtgggttggaataaatcctcatttctttttttctttttttttagtgaaggagttatgaaaaagcaagagcagatcttgcctgccaaagcctgggttgggatctcttatattgtaactcccttcaatttgacaaatattcattgagttctaatatattcacgttatatctctgatattttagagtcactgaggtgcatattttgtagaagggaaattctgtaggtggcattctggagatcaatgatttgacatagatttaaactgtgtagttataggtagttgtgttcatgtgtgctgggtaaccaattggatgcagtctgcaaagaggatctatttacttcaagctgataccacctgagaatttctaactgatgggttatatggtggtttaaaaacagatctacaaattcttcaacactctttcctttaataaatagagtctggttcctctctctttgaatgtaggttggacttagtgactgcttccaatgaatataataaaggagaagtgacagtgttggctatggagactagatcacaaaaggcaatacatcttgttctttattcattctcttggatcacaaactaaggtaggagatcttgccaacagccatattgtaagtggatcctacagccccagttgagccttcagatgactgcagcccctactaatattttaatgatacccacatgagagactctgagccagaaccacctagataaaacactctagaatttcttgcccaccaaaactgtgagataaaaaaaaaatgccttttctttaagccactaagttttggggtaatgaatttgtttcacagcaggatacaagtaatacaggttagaaatcccagaaatagctactgctgtttctgagaaatgattagctaagcaattattgccagactttattaatcttgaccaagtgttttaaagtgtattttttgcaattctctgcttaaaaactgtcaaattttattctcagcccaggtgttaaaacctaggtctttgtagtttcagcaatataaatttgcttagatatagatttatgtgctcttctgtacatttgaacaagatagcatcaaggcacatgtattttttatttcttcagcaaacattatctaaatgcttgattggtctctagcaccatgttgggtaaaataggtactgttgtgcatctatttattcacaaatattactggagcatctactaggggccaggcactatgctctgcactgatgatatgaaaatgaacctaccacattacctttgaggggctcagcatttaattggggaagtagacaggtaaacacatacttgacaacacagtgtggtgaatattaccccaaagatatgaatggcatgctatggtattgcagagactggaacaattatctctatgtgaggtcttgaaggatgaataggagttttcaagcaaaaaaggctgatgggttagaggatggcattccaggtatgggggaacagggagtgcaaagacatggaagtactaaaagcctgggttgccttttcatactttaatttcctcaacccaagaataaagagatggctggtaatatgcatgctcctggcagtctgatgcaggcagtacaggctattcatcttggcaccagcatttcatagccatcaggctactcatgatgccccaaactgaagggcccttttgttttcccaaggctctcagactgcaagaattctcatgataaattctgagccttgggatgacaaatgtataagtattttggaccatatagtttccttagtgtgaagaacctcaaattgtgcataaatctaagcttctgaacttggacttctaaggccttttatttttgatatttgttataaaagaatggaagacattgcctcttagatcagtgtcactcaaactgtgggtccaagacaagatagggttcacatcagaatgcaaatcaacatactgctgccttcatcaataaaatcaggctctgaaaaaaaggcagctgagctaaatggtttgcttaatggcatagtttatttacatttggcacaagctcctaatcttgccacagactgactggtaataaatagttcatgggttggcagtgatcaatagacgacatgttttagataactcactatccactaaatagaatcttctatggcaaatctctttgttttcttttagaacctggtctgtgctttactttccggttgtgaggtttatacaatttatcttgtccccctatttatatggcatatatatgtagtgtacttgtttccctttttgttttggcttctaattacttcagagtcaaatttgaagctcaagtgagtcaactatgttgacactttggggtgttgttttttatattctttttcttgattctgatttttaatttcaggtttatggttaatttgattattccattgaatatgtttttgccacatgatgttgaagatgatgaaaatgatgacaaccatgaaaataaacattacagcaagcatagacaatgggccaggcttctggtttgcatccatttgaatggaataatggttgtagctgtgcctccatgactccaaacaagtttgactgttttagtccctgaattgatagaatagggtttcatggagacacagtggtgttcatgaggaactgattcctctgcatgcagaaagtattgtcctccataaatgaagtcagcgtgcacagttaggaaaagagcactcaccgtcttggtcgttacctgagtcagctggagacttgcttcggcgcataggaccagggctcttggctgaagtcttctgaggtgttggggatgcctttgggccagctgtggctgatgggtttcccttcatgactcggcattctggggcaaaaggacacagacagcttagtagaggataaaacaggctcagcatgttatcagcctctggaaaccgcaataaccatcacaggccaaaggacctaaatgggtcaggactacaatgtggtccttattattagtaggagccatggttctggggagggaggcattagggaaaccttcaaaagccacctgggctaagctaggtgtttaagcccctgaattacgaaaacaagggcaagagtccataaacaggtcaagtaggcaattaaatagtcaattcaatcatttatggacaagctagctatgtctcagaatagcacctattgatataatgtttaattaatttccctgaattagagattaacaactcagaggttacagctacacagatgaaacatccattgagtaatttgaaggagaggtagagagctaccacttactattacatgccacacgttgatagacacatgatggatatcatgtcactttatataaataagcactatgaccaccaccatcttgcatttatcaagttcttttcgatttcccatgtatgttattgccatcccttatggggggttaatgaataaatgggccagcagtgactctgccactaaaaacttaagaaagcttgctggtgtgtgggagagtctgccaaatgttcttgtatttgccctagcctcagtctgacacctttggaacaccctttctatgcaggtcactcagcatccccttctatggtcattttgggcactaatagtgctaatttattagaaggattattattctcattttgctgatgagagtacaaaaaacttaacccctttgcctagggccacaaaacaagaaattagtaaaacaaggtctaaaagtcaagtcccctgagttccagtttagtgctctttctactacagtttttccaaccttgtgctgtgatgcacaaaggggaatcaaacagcagagtagaggatatagtctctcctttcctttaaacactttcttgttgcctcctacttaaaggtgcattgaaatataaattaaacagaaagattagaggagcttttctggtaaattgaatattttaggaaactgagttaagcagaaagcccccttttgtttgtttcacttcttgttttggttggtgacctttagtgatcactgtccagagctgaagatacagaaggtataggaaattggacataacctgaggtttgtttagctattctatagtcattgcttcttcctaaagggaacacagcagaaatgccacctcttacagggttcttgtcacttgagttgtttataaagtctatattagcaaaattccctttgattttttttcacactttgcttctcctaaatgggaaatatgctctgaatgtatctttctatcagcatcacattctacccttgttgctgcgtgagctaattaacctttaatgtatacctggagcttggactcaaaccaagggagatgggaagacgattagatccttcttattattaacaaccctctgtaaacctgaatcacaaggcagacgaatggggcagcaagtctgatggtgtgaaaagggtttgacactaagaatactgtggaaaaatctctctaaattggaaccataatcacaagctaaatagttggaggacgttgaatggagaaaaaaggatatgtacaatatccaagttctgactgaaaatattccttcctgtggtctgattgtgcctgttatcccatgtgacacaatatatggttcaagaaatatggtcactattggggcagatagtgagttttattgagtttggagcctgggactctgggatatccagtcagtctttcagtcttacatgggtcatgacccatgtatccaaatatacaggagaaagaccaacattataagcccttgaaggatcatgcatagatgttttccacaccatacaaacccatggaaatcctaaaggatagaaggggagagaacaatggagcaataaaacccagtggttatgcttaccattttcatccagagaaaaatcatcctgagcatagcgaaatttttcaggaccacaggcaataaacacatcatcatcaccaaagaaatcatggagacaagttacctatggagaaagcagaaacactgattgtatatgatggtcctgtgacaatgaacctcacactacactgacaaggagaaaagcttcccatctaggccatcatcttcagctcccaggagttttctctttcttaaaacacctaccacattcatagtctgaatcatgacccctagtgagggatgatatactgagtaccattgtctatccatgtttcatgtatggtactttcaattgcatcaagagtaagactgagaccatgtccaaatggaatgccgttttctgaagaaaagtcaaccagcagatggccctataaatgtcaccttttctcagagcctcaaagacgggaagctcctggcccaactctagggcaagggactgggccaaggaagatgagaaaaatcttctgcagcctgactgtagctgacccagaagtggaaatgtgctgcttcatctgaatgagttctaaaagaaggacatcatttcttaactgctttggacacacaaaaattgaacttttgctaaaagctggccgaaaacttggtagtggcccagaataccatttcttcctgtgaaaccagaagaggaaaacttcatcatgagcaatgggtcccaataggcctgagtttctactggtagagccatgttcccaggaccctcatgcctgctagcatcctaagcattactgcttctcaacaacagacagacagtctccccaaccccctttctgcacaaagagatgagggtccctgggaaagtatgctgcttcctgcagtctccccacttctcagctttcctaattacatctgttaattagtccagcacatcagggaaacccctggaggaaccataaagtcaaaacatgcttataccacctcttagtttgaaagtgttcaaagcctctaattgttctaagtttcccattcaagctgccagcaatggctttccaaaggcatggtgctcacaaactaacaacagcttgctgggtgcagagagcaatatgttacattagaaaaatatttatattaataacatcacccccacctaaggttaactcaatccctgttttcccaatcaaaacgattgcaagccttacacaaaaggagatatacttaaagattatccccattgtgtcagcctcccaatcatccaagagatgcccagagaagagaaggtgacttgaaggactgcagggtcactctcattaagcctctttccagtcctgggtcttgacctcatcaaattggccaacacctttcttcggcccacttgtccttcatccattcattccatgatcacagaatgacaatcagagctaccaactaactgaatgcttactctgtgacaggcactctggtaagtacttccaaatctgtcatctcattttaccctcacaagaaactctagaagtcagtatttattgtcattactattttaggcttgagaaaactgtgacccagagacaataagtaagttttccaggtggagagcaatgaagccaaataaacacagatctatctaacttcaaagcctgtccttttaaccacttggcaatacaaagcacttacatatagatcagtcactggggagacaaagatgaataagactcaggccatgacttcatggagctcacagtctgatgaggtgagatacatcgaaatagagcatttcaatttagtgtcatgagtactaggatgggattatctgttggtgctgtgagagctattgattaccatgtccaaatgaccctagtcactggttagcactgttagttcaataggcatcctgcatattgtcctagtagtggatccaatgacagaggctacatggttttgagcctagctgcagacctcctaccaatatcttggaccttggctcaataaaacacagagcccttaactctgatacaccaaatatctctgaactatttacctgccgccacatccttgaccctgaagatctctgccatatcttcctatttgaggctgcctttgaccctgactagctgactttatttttggtcatgagtcaggaatacctcacctgtgagtgtccctctgttagtggtctcaaggatttggcactttgtttcaagacctgcctgtattttcatgaggactcacttagttctccccaccggatcacaggtttctgaatctaacagccaaattcataccttcctctatatcttcctgtggttccttgtagagagcttatcacatagtgaaaatttacttagggctgtttctgcctcagctgcatgcaaagaaggtaagaaacaggaatattcaggggctttgtaaggatacacaaagacagaaaagtaggaataagaaagatgaaatcaattgtggcagacaacggagattagcatttagagactttaaaaggcaacacaaatatacaaatttaggaacaagaaaagtagaaataatgtgaattcagaaactattcttcacgtaactatgctaattagtttgaaaacaaatgaaatggatgatttttaaagaaaagtctaggccaggtgcagtgacttacgcctgtaatcccagcactttgggaggccaaggcaggtggatcacgatgtcaggagattgagaccatcctggccaacatggtgaaaccccatctttactaaaatacaaaaaactagtccggcgtggtggtgcacacctgtaatcccagctactgggggtgcgggggagctgaggcaggagaattgctcgaacctgggaggcggagattgcagtgagccgagatcacaccactgcactccagcccggcaacagagagagactccgaaaaaaaagaaagaaagaaagaaagaaaagtctcaataattaaattagttcaaaaagaaatagaaaattgaaactagctaatagctgtaaaaaaaaattagtaaatgcttcaaacagcaaccttccctgcaaagtcaccagagcattcattttggaggtatttgtggaaattgcttcctaagaagaaaacctaaaagctccaaagcagccatctcagacacatgccatgatatcctattgtaggacaataatgtcttacatattgctctaggggttgctgttacaatgatccaccctcctccaaccacaagcctctctacccacacccaggctttgggaaaagcctttggataacccctctttgggggagcctctaagaaaggcaaagtcccctgtgcttctgacagactcacaatggtgtggctggcttcaaacacaatcatgctacaatccagctgttcagcatcagatgtctttgtgtgatcccattccacattttactggctcccaaatgcagacaaatgcactttgtgcatgtggatacccagcttttctaaatgtcttggctattgagacacggcagccccccatctttgttacagggttgggaaaatagaatgctctccatcttaaataagaagaactcaaagcgcagagagtcaaagtgtcccgaagatacacagctggctcatggcagagttgggactagcattcaggtgttctgcttcaattcaggacaaaataactcaattgcctgaaagaacatattatcctaaagcactgacttcaaaggcatatctatagcctagacaggaaaatctatatttgtcctaatcaatgcctgctatgcattagaacatcttactggattgaaaaaataagcttctttaaggatatgtttaatctatggacaacaaaactcctattcattactgtaacaataaccaagtatatggtggagaaggaggacaaggagagggagaaggagggagaaaagaaagaagaagaagaaggaaaagaaggaggaggagaagaagaatggaatataagaaataattctcaaatgaaactcacactcacttaacacctgctttttaaaattctatggaggtaatgtgatacaaagtccaccttagctaacattacacatgtatgattttccaagttagtttttttgagatataatttccattacaagggggcaacagaaatagtaaatataataatcatcataatatcacttacagcattacagcatcctcagggatcaaaggtcttgctgacatcagcttcagtatgaatcatacttggatttttaagtcagggaagagaacacaaaggcatgacacctaccattataattaatcaacttccagcacaaaatcaataaaatcaactcacattaacattgaaccattaactcaatgctcttcctttgaaaaaaaaaaccagcaggtgttgggggaagggaagccagcttggttgtgcattagcatgaatgatagattatatggatagtccagtggcttaaatgtcaaattacacatggggaaatggagacaacagatcacggtgtcagagaagtttgagtctattagctgcaaatagaaacttcactgtgtgacttgatttaagcttgattagattctccatccacatattatagatgctggcagttcgtttttgaacatgcctggttctagtagattctacatttcacttacctaactattcagaaataaatgttttctcgagaagtaaggtcttgctcacattatctatgatgctcacttttaacttgtaaaatactttcttcaaaagttcaattctactaatattgatacattaagcacttactagggcaaaggaactctgtaagagatacagaaatgtgtaataaagggccatgtcttcaaagagttgacaacataataagcaagtcaggattacacaaataattggaatacaaggcaggctgttgttagcactactataaagatgcaaagaacaagggaagcacagaagataaagagaacaattctaattatgaactggggaaggcttcacagagaaaaactgagtcttgaaggatgagtgggatataggttgatggaggtattcctggcagaggtgattgcaaaacaaaggtaggtacctttttcttaacagccctaggaagagttgcatcctgttgactacagtaaggcattctgattttccaaagctgtgcagagcacaattaattgcctagactcacctgccaaccttctgcacaggcaaaacatagagttatctattggtggaattcagggtgaagaggagggcagagagtgtctatgaggaggagtggccagagtggtaaagaagagggaaacaccgtggcaaggaacacaaaccacactgatttttcagtcttgccaacagtgtgccttgcctatcaagaatggcagggaaattttgcaaaatgagttaataaaatctcagtaaacataacagatgaggctttttctaaatgttactgctactcgtattttggaacatttcccacctaccagccctggaccagctccagtcagaggttgacacagagttggcttggtgaactgcagcaacctttcggaaacaatcctgacttttttttttttttttatcaaactcatgtttctggggttatcttgaagccttacttgggggctttttatgacaacatttttgcctgcgcaacaagttccttggttctgtagtgccttttttttttttttgcacagttctctttattcaatgccctgaacttccctaaaatctgtgctgaaataataacaatggcacttacatttgtatggtatttttactgtttttgaaacacttccacatttatggtattttatgttttctttcatacttgtaattctcctctcaactcaatccgatcaggcttccattcccattgctccaccaaggctgctcttgttaaggccaacaatggcttccatgttgtcaaatccaatggtccttccctggcctcatcttactcaacccatcagcaacactggatataagttgatcgagttcttttccctaaatacttttccttctttgcttctgtgagatcaccatcttctgaatttccttctgcttcaatctcttttgctagattcttttccttttttagacttccagtatttgaaagccccagtgctcaggtcttacatctcttttattttttatttacatatttttactaggtgatcatatccagttccaaggctttacacactgctatggtttcaatgtttgtcccctccaaaactcatgttgaaacttactccccaatgtggcattattgaaaggtggggttttttagagatgattgggtcatgaaggctctggatgaatgggttaatggattaatgagttaccatgggaggagaactgatggcttttataagaagagaaagtgagacctgagctagcatgttcagtccccttaccatgtgatgccctataccacctcagaactctgcagaaagtccctaccagcaagaaggccctcaccagatttggccccttgaccttgaacttcacagcctccaggactgtaagaaataaattatgtttctttatatattacccagcttcaggtaatctgttataaacaacagacaattaactaagacacatgccatatatatactgaatactcacacattgatatctccaggtccttcttacccctgtactctagacatgtatttccatccaactgcctgttcaatatctccacttgcttgtctgataggcatcccatgtttaatatgcccaagactaaactgttatttctctcctccatattttacttcccttcagctttccttatcttaaagaaaaggcacaattctcacaattacccaaaccagaaacctgagagtcatttttcattaggagccacttttctccctctccctggtcacggtactagtctaaaatacactacaacatagcctcataactgttctctaggcagcatgccctccccatgccccacaaatacctattctgtgttgcataaagcagtcagagtagtattttacaattttaatcaggaatatcactcttctgtttaaaacccttgaaagtctgcccatcactgatagaataaaatccaaacattttagctccctgggtcggggaagggcagcactcatctctatagctccaggccacacttttcccttgctggagccagggagctgtactgcttggtcccaagacatgtccacaacagcccagcacactggctgtggcagactgtggccagagtgcctcttcaggcctgaccctgactcatccttcctcactgggtggggattccctgcaggaactttattaactctagtcagaggctcaggggcagaactctgatctccgtgggcctgaacctgtaggagtaagggggtctgcagtctctgtagaccagcagacttagcctttcttcctggtagttctgaggaatcagggcagcccagatgagtgggttttcccccagtgaggcacaccccttccaccaagggacaaagtgcttcattaaatgggtcctgttccccatgccactcgactgaatgagacccttcaacaggggttgtcagacaaactcatacaggagtgatcctactggcatcaggtttgtgcccctcgaggtcagagataccagaagaaggaagagacacccatctttgctgttctccagcctccttgagtgacatctctaggcatggagtgaatcagatgaatagggcctgaagtgaacccccagcaaaagacagctaccctacagaagagggacctgaccattgaaagaaaaacaaacaaacagaaagcaacaacaacagcatcaacaacaaccaaagagcccccacaaaaaccccatgtaaaggtcagcagcctcaaagatcgaaactagacaaactcatgaagatgagaaagaatcaatgaaaaaatgctgaaaacccaaaagcccagagttcctcttctccaaatgtctcttcaagggcacagaattagaaggagggtaagactgacgaattgacagaagtaggcttcagaagatgggtaatgaaaaaactatgctgagctaaaggaacatgttctaacccaatgcaaagaagctaagaaccttgattaaaggttagaggagctgctaactagaatagtcagtttagagaggaacataaatgacctgatggagctgaacaacacagcacgagaacttcatgaagcatacacaaatattaatagccgactcgaccaagcagaagaaaggatatcagagtttgaagaccaccttactgaaataaggcatgcagaaaagactagaggaaaaagaatgaaaaggaatgaacaaaccctccaagaaatatgggacttcgcaaaaagactgaacctacgattgattgcagtacataaaggagacagggagaatggaaacaagccaaaaaacacacttcagggtattatccaggagaacttccccaacctagcaagacaggccaatatgcaaattcaggaaatacagagaacaccactaagatactccatgagaagatcaaccccaagacacataatcatcagattctccaaggtctaaatgaaggaaaaaatgttaagggcagccagagagaaaggccaggtcacctacagaggtaagcccatcagactaacagcagacttctcagcagaaactctacaagccagaagagattgggggccaatatttaacattcttatagaaaagaattttccactgagaatttcacatccagtcaaactaagcttcataagcaaaggagaaataaaatcatttccagacaaacaaatgccgagggatttcattaccactaggcctgccttgaaagagctcctgaaagaagcactaaatatggaagggaaaaactggtaccagccactgcaaaaacacaccaaaatataaaaaccaatgacactatgaagaaactgcatcaaatagtgtgcaaaataaccagatagcatcattatgacaggaccagattaacagatatcaatactaaccttacatttaaatggactaaatgccccaattaaaacaacagactggaaaattggataaagagtcaagacctattggtgtgctatattcaggagatgcatctcacgtgcaaagacacacaccagctcaaaataaagggatggaggaaaatttaccaagcaaaaggaaagcaaaaaaaaaaaaaaaaaagcaggagttgcaatcccagtctctgaccaaacagactttaaaccaacaaagatcaaaaaaagacaaagaagaacattacataattgtaaagggaacaattcaacaagaagagctaactattatatatatatatatatatatatatatatatatatatatatatccatccaatacaggagcatccatattcaaaaaacaagttcttagaggcctacaaagagacttagactcccacacaataatagtgggagactttaacaccccactgtcaatattagacatatcaacgagacagaaaattaacaaggatattccagactttaactcagctctggatcaagtggacctaaaagacatctacagaactctccaccccaaatcaagagaatacacattcttctcaggaccacatggcacttattctaaaatcaaccacataattggaagtaaaacactcctcagcaaaagcaaaagaactgaaatcctaacaaacggtctctcagaccacagtgcaatcaaattagaactcaggattaagaaactcactcaaaaccacacaattacatggaaattgaacaaactgctcctgaatgactcctggttaaataatgaaattaaggcagaaatcaagaagttctttgaaatcaaagagaacaaagagactacgtaccagaatccctaggacacagctaaagcagtgttaagagggaaatttacagcactaaatgcccacatcagaaacctagaaagatatcaaattgacaacctaacatcacaattaaaagagctagagaggcaagagcaaactaatccaaaagctagcagaagacaagaaataactaagatcagagcagaactgaaggagataagcacacaaactcccccccacccccaaaatcagtgaatccaacagctgggtttttttttttttaattaacaaaatagataaacagctagctagcctaataaaaagaaaagagagaagaacaaaatagacacaataaaaatgataaaggggatatcaccactgacctcacagaaatacaaactatcatcagagaatactataaacacctctatgccaataaactagaaaatctagaagaaatggataaattcttggatacatacaccctcccaagactaaaccaggaagaaattgaatccctgactggaccaataacaagttctgaaattgagtcagtaattaatagcctaccaaccaagaaaaaaaaaaaaaaaagcccaggaccagacagattcacagccaaattctacaagaggtacaaagagaagctggtaccattatttctgaaacaattccaaacgactgaaaaggagggactcctccctacctcatttcatgaagccagcatcatcctgataccaaaaccaggaagaaatacaacaaaaaatagaaaatttcaggccaatatccctgatgaacatagatgcaaaaattttcaataaaatactggcaggctgggtgcggcagctcactcttgtaatcccagcactttgggaggctaaggtggtcagatcacctgaggtcaggagtttgagaccagcctggccaacatggtgaaaccccatctctactaaaaatacaaaaatgagctgggcatggtggtgggcacctgtagtcccagctactcaggagtctgaggcaggagaatggcttgaatctgggaggcagaggttgcagtgagtggagatcgcgccactgcactgcaacctgggcgacagaacgagactccatctcaaaaaaaataaaataactggtgaaccgaatcaagtagcacatcaaaaaaacttatgcatcatgaacaagtcggcttcatcctgggatgcaaggctggttgaacatatgcaaatcaataaacataatctatcacataaacagaaccaaagacaaaaaccacatgattatctcaatagatgcagaaaaggctttgataaaattcaacattccttcatgttaaaatctctcaataaactaggtattgatggaacatatctcaaaatagtgagaacaatttataacaaacccacagccaatatcaaattaaatgggcaaaagctagaagcatttcttttgaaaactggtacaagacaaggatgccctctcttaccattcctattcatcatagtattagaagttctggccagggcaatcagtcaagagaaataaataaacggtattcaagtaggaagagaggaagtaaaattgtatatgtttgtagatgacatgattttacatttagaaaaccccatcatctcagccccaaaactccttaaactaacaagcaatttcagcaaaatctcaggatacaaaatcaatgtgcaaaaatcacaagcattcctttacaccaacaatagacaagcagagaacaaaatcatgaatgaactcccactcacaatcactacaaaaaaagaataaaatacctaggaatacagctaacaagggatatgaaggacctcttcaaggagaactacaaaccactgctcaaggaaataagagaggacacaaacaaatggaaaaacattccatcctcatggataggaaaaatcaatatcgtgaaaatggccatactgcccaaagtaatttatatattcagtgctattcccatcaaactaccattgacattcttcacagaattagaaaaaaaacactttaaatttcatatggaatcaaagaagaccctgtatagccaagacaatcttaagcaaaagaacaaagctggaggcatcacgctacttgacttcaaactatactagaaggctacagtaaccaaaacagcacgttactggtagcaaaacagtcatatagactgatggaacaaaacagcaacctcagacataataccacacatctacaaccatctgatcttcgacaaacctgacaaaaacaaacaatggggaaagcatctcctattcaataaatggtactgggaaaaactggctagccatatgtagaaaactgaaactggaccccttccttatatcttacacaaaaattaactcaatatggattaaaaacttaaatgtaaaacccaaaaccataagaaccctagaagaaaacctaggcaataccattcaggacataggcacggacaaagacttcacgacaaaaacgtcaaaagcaattgcaacaaaagccaaaaatgacaaataggttctaattaaactaaagagcttctgcaaggcaaaagaaactatcatcagagtgaacaggcaacctacagaatgggagaaaatttttgcaatgtacccatctgacaaaggtctaatatccagaatttacaaggaacttaaacaaaatttacaagaaaaaaacaaacaaccccatgaaaaagtgggcaaaggatatgaacagacttctcagaataagacgtttacatggccaacaaacataggaaaaaaagctcaacatcactgatcattagagaaatgcaaatcaaaaccacaatgagatactatctcacgccagtcatgcgtctttatagtagaatgatttataatcctttgggtatatacccagtaatgggattgctgggtcaaatggtatttctagttgtagatccctgaggaatcgccctactgccttccacaatggttgaactaatttacattcccaccaacagcgtaaaagcattcccatttctccacagccttgccagcatctattgtttcttgactttttaataatcaccattctgactggtgtgagatagcaactcgttgtggttttgatttgcattactctaatgatcagtgatgttgagctttttttcctatgtttgctggccacataatgtcttattttgagaagtctgttcatatcccttgcccactttttcatgggtttttttttttcttgtaaatttgtttaagtttcttgtaattctggatattagacctttgtcagatgggtacattgcaaaatttttctcccattctgtaggttgcctgttcactctgatgatagcttcttttgctgtgcagaagctctttagtttaattagaacccatttgtcaattttggcttttgtgttcaatctggaatgtttcatagactgtcagagctagaagagacaacagatgaaaaggataaacaaaatgtggtatatccatacaatggaatattattcagctacaaaaaagaatgcagttctgatatatgttacaacatggactttgaaaacattatgttaagtgaaataaccagacagaaaaggacaaagattgtgtgattccacttgtatgaaatatctagaagagacaaattcataggatcaaagactggattagaagttgccagcagctagtgggaggaaggaataagaagtcattgcttaatggtaacagttggttgtcatgttaaaagtttaaaaagttctagaactagatactgatcgaacgatactgtgaatgtaactaaagccactgaattgtacacataagattattaaaattaattgcacacattaaaatggcaaaatttatgttacacatatttgaccaaattaaaaacattaataatataatatacccaaaccattgaattatacactttaaatgggtgaattatacattatgtgaataatataacaataaaactgttaaaaaaagaaatgtaaaaatgattattaaaatttattcagaatttacttatattgtagccaaaaggccttttaaaatacttattctgacatattacagtaacagaagtcaaagttcacctatatggagatgtcttacctattgcccaatataaactagaaccaccaccaccataagaatttaggctccacaagagtagagacctcacctgtttgttcaccattctatccctactaagttaaagtacaaaaaaacacatatttaaaaattattattagtagtagtaacaagcaagagtaagaagaatctaaaacccataattaaatcttagtttcataattaaggatattgcaatataataaggttatctgtggactactagtgatcactgtcctctgcatcttatggaagagtaagtcataagagatgaaactgacttgcttacttaattcttgatctttttgttttctgattatttgcttaaaaacaacacaatgtcaccccccttcccaactaaaatccatttctttgagtgcctggatcattatatgatgagttttgtcttttctccctctttcacccatcaaagcatccatttcttgaagacaccgatttcctttggcttgccttgtggggcttagctacagaaaatgacccatcccaggcccttaagaaaaagtgttgactagctgattgtgaagggaaaaattgatattcttttcctactatctgtatcattttctgggaattcccagcccctgtgcagccagtttacctattcctatagcaagtcatattgagactgacgcccgtctgatcctccagccactagatctgactgaatttctctccactctttcctggtgaagagtgactggtcctcagaagctctttacattggtcttttggctgtaaagtgccataataaacttttcgaatagatcgtgttctgtcaactcatttttccactgatcttcttagccccatagccaatggtgactctcctctccccattttagaatttcccccaggcaacccagctatattaaatctgggctgtcagatctcagctgagatattggtcttcaaatttattgttttcaacctttaaaatagtttatctttgaatggtgaagggccataatgatcctacatagcttttgctgttttacatgtgtcaggtgcccttatcttcattacctcatttggttcattggcctcatttttaataaatgaaatgtcaaggtccatgaaggttcagtgacctgtacaaggtcacattgctggctaatgacagagctgatactagaactcaagattgtctaatttattctgacactataggtacctaaggtatactgcaaaggcatttcctagacaggggagacccaggtaaggaaaaacagcaggagactctgagtagcatgaaaataccagtggtatgggaaagaagggcacagaggggagatgtgaaggaataagactttctaccctattttacctggagctagtggtgatttaataacctgagctaggcaataccagcctgattggaaggctggcagcccctcgatgctcaagggtgttctttccttattttgtctttgccatttttccaagagtctgtgtcagctcccactgggggcctctcaaggatgagaacagctgcagaggcgctggagttgggctgttgagtacatgcccaggactgacacctgcccttccacaaggccctggggacaaattggctcagagaaacagagacgagacagaactccattcatcagaaagaactggggtggaaaaaccctgcttgatcccttggcaccattaagccctaaggttggctctgggccccacacaactctaggttctgtttagtaaggtcaattaaaataagagagtgtgcttgtagggcccattacagttatctgttgcatttaacagtttcctggtgtctgctagacacaaagcatgagagggatattgcttttgaatcacgtaggggaaggaaaggtttgttaaaaaaaaaaaaagaaaagaaaagaaaagaaaagaaagttattgtctacctgcattctaggttacaacttgacactggctcactgctttctctctgggtctgtttcttctgctataaggagaaggtgctgatctagagccttttgagatctatatcttttttgtgtcacaagccctttagagaatttgatgaaagctgtaggtcttctccctagaaaaaatgcatatatgcccatagatagctagttttctatatagtttaggggggttaaggattcctttgaagcttgtctatagatcccaaattaagagtctctagactagttgatttctgaggtctcttctagctcagacagtctatgaaacattccaggttggacacagttaatgagcagtgacacccgggccagaatgctggcagctgtcgtggaatcccagaggcttaactgtaccccccttcccaggcttcctgagactccagtccaaaggaagcaaaaggatataagctcattctctgcaaactgagtccaagggaagcaaaggagtgcaaactgatttacggcaaaccaaagactagagtgtgcatcagacccattgcctcccaggttgctagaatttaggaaggatgctaacttttcaggagagtgtaggcatgagaggcatgacctctaaatgttccttagtggttggttgaggacaggaaaaaaaaagcatgactgcccagttggtaagggacatacagcttgattatagatattctgaaattgttacttaggagctgacctcaacatggctggacagaatactaatgaccataaacatactgcatttccttacataatatcccctactctgtaagtgtatattttgctatgcaagaagaaggttaggagagaagaaagaacgagttctcatgggtacatcaaccatcagtcagtgtaccagtaggaaatatatgacactcctagagtggataaattgagtggagtttactaaaggggattgattacaaaagtatgggcagggtatagaagaaccacagagggcactgtagaattttaggaatagtaatagtgaagttcattaccactcttaggcctcaaggagagaggggaggtatcaggaaccagaactcagagggaaggagagagaatgacaattagatatagagaacactctgataagagctatgaccttcagtcaaggaatgcccagcaacctctcaggcagggtgcctggaaatagatagcctaatctcacatttctccttgttagtgctccccattggctaaatacaactggaatccaaaaaacaagggagcctgttgataagagtcagcttcccaggacacagagcagggtggaatagagtagagagtagaaaggagatctggaggggaagtcctggagagtagatctgccactgtaagcaaaaggaaggagctgttgttatagcctagaatataggaaatgtgtgaatagtgattaagcaataataataataccattttgcatttgtaaaagcctttacgcattttgtgcttcagtcaccccattgtctcctctgaaccatatagttaccatgtaggcaaacaggtaatttattttatggataacgaaactgagggtcaaccaagtttaggtgatttgcaaagaccaaatgtctacaaaaaaaggacatggactagaacttgggtttgagctcctggtctagtacaatttccactatatcatgttatctcttctgtacccttagtccacagagctattctgatagttcttcagcgatctcctgcttcttctgacacacagtcaattccaccacaagagcaacgataagagggaaaattatatacacttcttcctctcatttttgggaaagggttagtgtattagtccattctcacactgctaataaagacatactggagactgggcaattataaaagaaagaggtttaactgactcacagcttcacatggctggggaggccttacaatcatggtggaaggcaaggatgagcaagtcacatcttacttacatggtggcagagaagagggaatgagaaccaagtgaaaggggtttcccccttataaaaccatcagatcttgtgagacttattcactaccatgagaacagtatggaggaaaccgcccccatgattcaattatctcccactgagtcccttccacaacatgtgggaattatgggagctacaattcaagatgggatttgggtgaggacacagccaaaccataccagtcagtatgggggctcatgagggaacaagctgagttggaagataggtaagaggatacagtgttctttgcactcactattttccagaacagaggttcttagacccagtttttgccaaacgactttagtcaagattccctatcctgtctccctcttctctcttctggcctctgggtgttacaccttatcgactatatacttccagtgtaacagatatgattgaatggaagtagggaaataaatgaaaatgaagaaatgacaagctcaaggtaaacaataagaaaacagaaacagtatatcttttagaattcaactgcaaaaagtaaaaagtatttacacatgtgttccagttagcatgtaaaccatctattaagtg

SEQ ID NO: 780 - DNA, 531 bp, Homo sapiens
  misc_feature 20, 452, 453: n = A,T,C or G
gctgcccctctgcccacggncgggctcagatgtcgccctctggtcgcctgtgtcttctcaccatcgttggcctgattctccccaccagaggacagacgttgaaagataccacgtccagttcttcagcagactcaactatcatggacattcaggtcccgacacgagccccagatgcagtctacacagaactccagcccacctctccaaccccaacctggcctgctgatgaaacaccacaaccccagacccagacccagcaactggaaggaacggatgggcctctagtgacagatccagagacacacaagagcaccaaagcagctcatcccacttgatgacaccacgacgctctctgagagaccatccccaagcacagacgtccagacagacccccagaccctcaagccatctggttttcatgaggatgaccccttcttctatgatgaacacannctccggaaacgggggctgttggtcgcagctgtgctgttcatcacaggcatcatcatcctcaccagtggcaagtgcagg

SEQ ID NO: 781 - DNA, 3541 bp, Homo sapiens; identical to SEQ ID NO: 171
  misc_feature 1282, 1522, 1840, 1841, 1845, 1851, 1855, 1864, 1903, 2109,2218, 2476, 2488, 2574, 2734, 2753, 2774, 3259, 3381, 3398: n = A,T,C or G

SEQ ID NO: 782 - DNA, 925 bp, Homo sapiens; identical to SEQ ID NO: 172

SEQ ID NO: 783 - DNA, 1472 bp, Homo sapiens
gaattccaagcatgaagataatgagtcaagagcttggagtttgtagctagatgagctttggttgaattttattttattttatttttttaagacagggtatcgctctgtcccccaagctggaatgcagtggcacaatcatggctcactgcagcctcaaactcctgggctaaagcgatcctcctggctcagcctcccaagtagctgggactacaggcatacgtacgtcatcatgcctggctgattttttacatttttttgtagagatggggtctcaatatgtggccagggctggtctcaaactcctactctcaaggaatccatacacctcagcctcctgggcagctgagacagcaagtgtgcgaccctacactcagctatgggctgaattttagagataatggtcgctctctttataattagaagcaacctatgcagactgggtagcaaatagaatgggtttaattttttgctgtcatgtgagatctgtaagggattttggggaattttaggaagcaatcctctaagatctcaaattatctcacagctaaatgtagattacagtgactgatgagctgctttccccctttatctcagattcatttcaattctctttagtgggaagggatactattcatttgttcttttcattcagagtcccttcatgcccttaatttcataaccctctgagaagggctgacttgttagtatcatttcatttcacagctgagacaactgagctccagagagatttgtggagagcggagctcttcttcagctttcatttgtgagtgcttttcctgtgtcaggcacagaacaggcactggggatataacggtgtaaatatttcagggaactaagtatcagttggttgaacgagctgaacttttgagaaagaaactgcattgagtaatcagcagagtttcacaatgcctgagagtccagtaatgtgagaatcagaattagcaatgtgagaatagaatgtattgcacaaagtctcagcagggagtctgtgtctggttttagttccaggtccgggtagcacctttgcaattgaccacttcttccctctctccacctataaggctaatggcctgggatcttgtgatgtttagggctcagatggacactgagatggcctctttaatcaaccaacttcccaggccaatctcttccctttcttttctgatagttgctgtgttggcctcatagccttacctggcataggaaagataaacaatctccttggtgtcaggatttctggtctctggctacgtttcctgcttatgcaatagtagctgggagaggccgaaagaattctggtggggccacacccactggtgaaagaataaatagtgaggtttggcattggccatcagagtcactcctgccttcaccatgaagtccagcggcctcttccccttcctggtgctgcttgccctgggaactctggcaccttgggctgtggaaggctc

SEQ ID NO: 784 - DNA, 2076 bp, Homo sapiens; identical to SEQ ID NO: 174

SEQ ID NO: 785 - DNA, 2691 bp, Homo sapiens; identical to SEQ ID NO: 175

SEQ ID NO: 786 - DNA, 681 bp, Homo sapiens
gaagacattgtggctgaccacgttgcctcttgtggtgtaaacttgtaccagttttacggtccctctggccagtacacccatgaatttgatggagatgagcagttctacgtggacctggagaggaaggagactgcctggcggtggcctgagttcagcaaatttggaggttttgacccgcagggtgcactgagaaacatggctgtggcaaaacacaacttgaacatcatgattaaacgctacaactctaccgctgctaccaatgaggttcctgaggtcacagtgttttccaagtctcccgtgacactgggtcagcccaacaccctcatttgtcttgtggacaacatctttcctcctgtggtcaacatcacatggctgagcaatgggcagtcagtcacagaaggtgtttctgagaccagcttcctctccaagagtgatcattccttcttcaagatcagttacctcaccttcctcccttctgctgatgagatttatgactgcaaggtggagcactggggcctggaccagcctcttctgaaacactgggagcctgagattccagcccctatgtcagagctcacagagactgtggtctgtgccctggggttgtctgtgggcctcatgggcattgtggtgggcactgtcttcatcatccaaggcctgcgttcagttggtgcttccaga

SEQ ID NO: 787 - DNA, 3362 bp, Homo sapiens; identical to SEQ ID NO: 177

SEQ ID NO: 788 - DNA, 823 bp, Homo sapiens
ccgcgggcgcgtcggccatgagcgagttgccgggcgacgtgcgggcgtttctgcgggagcacccgagcctgcggctccagacggacgcccgcaaggtgaggtgcatcctgacaggtcacgagctgccctgccgcctgccggagctccaggtctacacccgcggcaaaaagtaccagcggctggtccgcgcctccccggccttcgactatgcagagttcgagccgcacatcgtgcccagcaccaagaacccgcaccagttgttctgcaaactcaccctgcggcacatcaacaagtgcccagaacacgtgctgaggcacacccagggccggcggtaccagcgagctctgtgtaaatatgaagaatgtcagaagcaaggggtggagtacgtgcctgcctgcctggtgcaccggaggaggaggagggaggaccagatggacggtgacgggcctcgcccgcgggaagccttctgggagcccacatccagtgatgaggggggagctgcaagtgatgacagcatgacagacctgtacccacctgagctattcaccagaaaggaccttggaagcacggaggatggggatggcactgatgactttttgacagacaaagaggatgagaaggcaaagcccccaagagagaaggccactgatgagggcaggagagagacgaccgtgtaccgagggctggtccagaagcgcgggaagaagcagttgggctcgttgaaaaagaagttcaagagtcatcaccgcaaacccaagagcttcagctcctgtaaacagccaggttaataaaagcacatgccgtgaaaaaaaaaaaaaaaaaa

SEQ ID NO: 789 - DNA, 3257 bp, Homo sapiens; identical to SEQ ID NO: 180

SEQ ID NO: 790 - DNA, 1897 bp, Homo sapiens; identical to SEQ ID NO: 181

SEQ ID NO: 791 - DNA, 3213 bp, Homo sapiens; identical to SEQ ID NO: 182

SEQ ID NO: 792 - DNA, 2455 bp, Homo sapiens; identical to SEQ ID NO: 183

SEQ ID NO: 793 - DNA, 253 bp, Homo sapiens
ccgcgggagaggtggctttgaggagtgagctcccggtccgcggggacgcgagtgggcccagtgccgggctgccaggcggggcggggcggggccggggcactgagaggggcggggcctggcggctgggaggggcggggcggatgcgggacagcggcctggctaactcctgccaggcagtgcccttcccggagcgtgccctcgccgctggtgagtgaggacgggacgcggagggggcagcgggaagtgggggccc

SEQ ID NO: 794 - DNA, 487 bp, Homo sapiens
ctgaaatgcgttcactcagccactcccaccccgcacatctctgcgcctcctgatcagctgactggttgatctgtgggtgacaggcctttcggggatgctggaggagacacgggcctgaccccatggcctcggaatgccctcacgcagccctgtcttctctttcagagctcccctgaacagcagctgcagcagccatggccccgccctgggtgcccgccatgggcttcacgctggcgcccagcctggggtgcttcgtgggctcccgctttgtccacggcgagggtctccgctggtacgccggcctgcagaagccctcgtggcacccgccccactgggtgctgggccctgtctggggcacgctctactcagccatggggtaggtgggcgtgcactggcctggggataagcctggccctttgcaaggggaggcctggcccaggacagagggtcttctccaggcgggccatggaccatggcatggtttccc

SEQ ID NO: 795 - DNA, 645 bp, Homo sapiens
gtgtcctaaatgctgggtatcgcatgaagcactgccatgtgctaactagaatctctacagcaaccctatgaaaaatgaaggcccagacaggtcaagcaacttccctgagatcacacagcagtcagtgtcaggtcacgtatgaaccatcactgtgccactcggaggtgggcaacgctcctggccttgttcctaatggtgctctgaactgcggcctctgtttcaggtacggctcctacctggtctggaaagagctgggaggcttcacagagaaggctgttggttcccctgggcctctacactgggcagctggccctgaactgggcatggccccccatcttcttggtgcccgacaaatgggctgggtaagtgtggccacagcatgtgtccctgatccctggatccgacccttggaggacgtggggcatcacatatgacactgggtcagtgtctatggcggggccaggggagacaaaaggccatgtctctctagctgtaagcagcccacaccctggagcctcccctctactgactcctccggtgagggaagctattaaagcagaaggggttgcaggggtgggtttgggggccactgtgtaggaaaacccacacgaagcctggtactgtgtgggcagggtcactggcccc

SEQ ID NO: 796 - DNA, 684 bp, Homo sapiens
aaactagctgcgatggggagggcttggccaggtcactcaagggtggagtgggggtgagtgaggctcctgactcccaaatccagtgggagttgggcagtgggacaggcacttgggtgaacgcggtgcctcaggcctccccatcctccgtccccaatctctgcaggccttggtggatctcctgctggtcagtggggcggcggcagccactaccgtggcctggtaccaggtgagcccgctggccgcccgcctgctctacccctacctggcctggctggccttcgcgaccacactcaactactgcgtatggcgggacaaccatggctggcatgggggacggcggctgccagagtgagtgcccggcccaccagggactgcagctgcaccagcaggtgccatcacgcttgtgatgtggtggccgtcacgctttcatgaccactgggcctgctagtctgtcagggccttggcccaggggtcagcagagcttcagaggttgccccacctgagcccccacccgggagcagtgtcctgtgctttctgcatgcttagagcatgttcttggaacatggaattttataagctgaataaagtttttgacttcctttaccatggcctttttgcttgggtgggacccctggccacagggaagagggggagctggggctgcactggagctcgtctctgcag

SEQ ID NO: 797 - DNA, 7947 bp, Homo sapiens
ggatccacgcttagtgggaaactggagggatcaatggacagagagaagtcagattaataggagtgaggaaaaacaatggcttgaaaaaacagaaggttatagtctaagaaagcattctataattataatttcaaaggtagagcagttttgagagatagcaagcccaatgcagccatgggactggtttgcttaagtgaagtgaaggtaatgctcactgggtttaatgagatgaagaaatggaaggttagggtgttgaatgggtcttttacctagatattttgatcatctaggtcaaatgatcgcaggagttgggatggacagaaaggtgaagtgccataatcttcagtgtgggaatataatctataggttaatggaagccagtggcctgtaggacaacagcaggagtagagggatctatctaaaaagtattgaggtcagaacaagggatttcacatgagtattggattaatggttttggaagttaaaatgacactgctgacaccatcttccatatggatttttggggggaaaaaaaggaagactggaagggaattgaatcctcagggttttaactctcattgaaaatcctcttgtaatgaccccagttggaagtagtaaactcagacctccttgtgggctttgagttaccattagaagaagcaaaggtccgtttccattttatccacctgagcccactaaacaagatgcaagattcctccatggcccttagaacaaagttgatttccttgaaaaccttgggaacccataataaacaggaccccagctgattgtagatctcctgggaagctacttaaaactggaaactgatttgaataaaaggatcctggtcttgcaaaagctttactctgttcataaatgtagtcgtaaaatgaagacaaaattgataatatggggacataaaggataaaagaggaaaaaaattttttcactgcaatctttcgaggcagatcacttttatataagtctccatattgtaaatgcagaaacctaggctctgagaggttattttgctgatgtcatacagctaggaagaaccccagtctgtgggtctctacagcccactcacttgtggtgattcccaggggaccaggctcaggacgcaggtggggagccctgggcttactcagtgcttgactggccagaggggagaatccgggtggcggccccacccttgcctagcatttgggaccacccatgcaagggaggagccagtaccgtcactagttactaggcagaggggtagtggtggtggaatatagagctcatgtgatccgtcacatgacagcagatccgcggaagggcagaatgggactccaagcctggtgagaaattgagagggctcgggagaaagggatcacgttggagggagcacacattgggagggtgggaacacaaggacaacgtagctcccactgaaacccacctgctgcccctacagcctcctagggctctttgccctcatcctctctggcaaatgcagttacagcccggagcccgaccagcggaggacgtgagttgacttagcacagactgcccccttccccataccctgttctgcctcccactgtcctggtcctagcttctctcacccccgtgccagctcctagtacgcactccatagcttcatctctatgttcctagcctcagtccccttcattcacctcatgtgatctgtatctgctcctaggatcctccccaaggtctcagctcctaatctggaaccttccatgaccaatattttccatctccaccctaaccaaagccatgtccctgacccctgaccctacaggctgcccccaggctgggtgtccctgggccgtgcggaccctgaggaagagctgagtctcacctttgccctgagacagcagaatgtggaaagactctcggagctggtgcaggctgtgtcggatcccagctctcctcaatacggtgccttttgggactgaggacaggatgtgggatgcggtggagggacacagggctgggttgggcatggaatggcgatcatgtcagagcctgccaagacacttgtgttcctcaggctagaaacctaaaaggggatgtggttcagtatacaggctttatgatcaaatacgaactcaaattctgactctgctacttactagctaccaggcatctagtacaacttacgttctttcccctaccctcaaatccattctaatttcctcttttgttcacatactaaggctgccagttctaactcccaaagagcctttggattaatctccttcttgccgtcttttgttacgaccaactccgttatttattcccactcctggactactgcccagctccccagctgatctgcagtctcctccctccaccccacccctcactgtactcccccactctgcttcaaaacagtctctccaacagtcaaaatggattggtctctctgtactcctacagcaggggagtgtgtgcttgtgaactgcagaggctggggacggggcagtgtgacatagtgtgcatggcaggaaacagtgactcaccattcgtgttaagcttaaaatcaaaaagtatgcaaatttgagtaaactgaataactggtgccgaaagatttgaaaacatttaccggacataagcttaaaattaaaatggaaaatttatatgtattaactcattcattttcatgatcatggcaatacatgctgtggtgcgacatttgcaacttactggcctttagggtaaatccatattattggccatggcatttcaagtctctccagccttttcttctctgcttcccaagtacacctacacctgcacacatagccctcctttaccctgttccaggctttgggaagtcctgatgtctcatagttgaggtccaaaagggggagtttgggaaagcaatgaatgagggcaagtgcctcttctgaatccctgcaggaaaatacctgaccctagagaatgtggctgatctggtgaggccatccccactgaccctccacacggtgcaaaaatggctcttggcagccggagcccagaagtgccattctgtgatcacacaggactttctgacttgctggctgagcatccggtgagaggaaatgattgctccatggagggcaccagtcatcccatcagtgagatggatgggagggagttgagagcttgctggggcttgtgggtgggagctaatgcatggggagacagtgactgactgcccagggatgctcagaggtagcttcttctgttccgttttgagctttctgacctctgttctctgacctccagacaagcagagctgctgctccctggggctgagtttcatcactatgtgggaggacctacggaaacccatgttgtaaggtccccacatccctaccagcttccacaggccttggccccccatgtggactttggtaacacctatggggtgaatgggggatggggcacacagatccaggggctgaggaagtttagatgccattggggactgggggtggggtggttgtaaggtgggcattacagtctataagatctcctcaagcctgacttctccctacagtggggggactgcaccgttttcccccaacatcatccctgaggcaacgtcctgagccgcaggtgacagggactgtaggcctgcatctgggggtaaccccctctgtgatccgtaagcgatacaacttgacctcacaagacgtgggctctggcaccagcaataacagccaagcctgtgcccaggtgagccaagcaaagagccccagggtcctcatagcctccccacagtgtcctcaattccttaccaccctgggactcaccctcggacccacgatctctgctctgactccctccatagttcctggagcagtatttccatgactcagacctggctcagttcatgcgcctcttcggtggcaactttgcacatcaggcatcagtagcccgtgtggttggacaacagggccggggccgggccgggattgaggccagtctagatgtgcagtacctgatgagtgctggtgccaacatctccacctgggtctacagtagccctggtactaccaagaggactggacagtggggaagggggtgggagatgggtgttgatccctgctccctcaagggaatgctataagctggagagagatcctgacaacccccagtgactatctttgtgcccatccctcaaaaaaaaaaaaaaaaaaatccaggccggcatgagggacaggagcccttcctgcagtggctcatgctgctcagtaatgagtcagccctgccacatgtgcatactgtgagctatggagatgatgaggactccctcagcagcgcctacatccagcgggtcaacactgagctcatgaaggctgccgctcggggtctcaccctgctcttcgcctcaggtgacctcctaccctaaacttagacaacgcttacacctctgcacgcctgggtgctttgactccacagtgatccctgagcctggtctctgactcataatctgacactcagaccttccagtagggaccactgacctgacctctacactctgacctcctacagtaacaaatttcccctctgacatccgaacccacatactaagccctaaccaattaatatgaatgctacacttggtctctctcaggtgacagtggggccgggtgttggtctgtctctggaagacaccagttccgccctaccttccctgcctccaggtaagtactctagcctaccactcaggtataaccaccacctttcacttgtgatctcatgatgtagaacctttgtcttgaccccaccatgtgctcctgtggttcagccttaagctttgcctgccctggttgctgtactcctgtctcttcttcctgcaggtcccaggccccaaatctcttgtgtgggatacagggtcatagctgttccttttcgtcagttcccaggcatttgagtggaagatttggtgggtgttctgtacagaaaagtgtgcacagtcacctcaggccatgccttgaaggctcaaaatctcttagtcaatcccatatacatgcttccccacagagtctagttcctccagcaagacctgggctatactcacccctccccacatatcttggaggtccccttgggtcccctactatccaaatgctgtcttctcccctcagcccctatgtcaccacagtgggaggcacatccttccaggaacctttcctcatcacaaatgaaattgttgactatatcagtggtggtggcttcagcaatgtgttcccacggccttcataccaggtacgtgtgtttgtgtggatggatgcagggtaagagtgaggatgggggatcctcagttcagctgactgctgggcaggccacatgccaatactcactcaaaaatgcctttcaggaggaagctgtaacgaagttcctgagctctagcccccacctgccaccatccagttacttcaatgccagtggccgtgcctacccagatgtggctgcactttctgatggctactgggtggtcagcaacagagtgcccattccatgggtgtccggaacctcggtgagaatcagcccatctccaaactctcactcaggaactacccttaccccctaacaccttgaacaccttgcacctagaacccctgactccttagagatgtctgatactttaaagcatcactcccaaaaagtccaatcactcagaacccctgaccttacttgcaccttcactcttgtaggcctctactccagtgtttggggggatcctatccttgatcaatgagcacaggatccttagtggccgcccccctcttggctttctcaacccaaggctctaccagcagcatggggcaggactctttgatgtaagtatggaagggaagggtgtggacgttttcaaacaactatggggagtgctaagggggacttgggggcagttagggtggtgtggaatagcctttgaaatgtgagtacagggtgaggagatatactctttaagtactggtactagtaggcccagatctgatgccagcctcctccctaggtaacccgtggctgccatgagtcctgtctggatgaagaggtagagggccagggtttctgctctggtcctggctgggatcctgtaacaggctggggaacacccaacttcccagctttgctgaagactctactcaacccctgaccctttcctatcaggagagatggcttgtcccctgccctgaagctggcagttcagtcccttattctgccctgttggaagccctgctgaaccctcaactattgactgctgcagacagcttatctccctaaccctgaaatgcggtgagcttgacttgactcccaaccctaccatgctccatcatactcaggtctccctactcctgccttagattcctcaataagatgctgtaactagcattttttgaatgcctctccctccgcatctcatctttctcttttcaatcaggcttttccaaagggttgtatacagactctgtgcactatttcacttgatattcattccccaattcactgcaaggagacctctactgtcaccgtttactctttcctaccctgacatccagaaacaatggcctccagtgcatacttctcaatctttgctttatggcctttccatcatagttgcccactccctctccttacttagcttccaggtcttaacttctctgactactcttgtcttcctctctcatcaatttctgcttcttcatggaatgctgaccttcattgctccatttgtagatttttgctcttctcagtttactcattgtcccctggaacaaatcactgacatctacaaccattaccatctcactaaataagactttctatccaataatgattgatacctcaaatgtaagatgcgtgatactcaacatttcatcgtccaccttcccaaccccaaacaattccatctcgtttcttcttggtaaatgatgctatgctttttccaaccaagccagaaacctgtgtcatcttttcaccccaccttcaatcaacaagtcctcaatcaacaagtcctactgactgcacatcttaaatatatctttatcagtccacaagtccttccaattatatttcccaagtatatctagaacttatccacttatatccccactgctactaccttagtttagggctatattctcttgaaaaaaagtgtccttacttcctgccaatccccaagtcatcttccagagtaaaatgcaaatcccatcaggccacttggatgaaaacccttcaaggattactggatagaattcaggctttcccctccagcccccaatcatagctcacaaaccttccttgctatttgttcttaagtaaaaaatcatttttcctcctccctccccaaaccccaaggaactctcactcttgctcaagctgttccgtccccttaccacccctgatacaactgccaggttaatttccagaattcttgcaagactcagttcagaagtcaccttctttcgtgaatgttttgattccctgaggctactttattttggtatggctgaaaaatcctagattttctaaacaaaacctgtttgaatcttggttctgatatggactaggagagagactgggtcaagtaagcttatctccctgaggctgtttcctcgtctgttaagtgtgaatatcaatacctgcctttcataatcaccagggaataaagtggaataatgttgataacagtgcttggcacctggaagtaggtggcagatgttaacgcccttcctcccttgcactgcgccccctgtgcctacctctagcattgtaacgaccacatagtattgaaatggccagtttacttgtctgccttcctttccaagaccgttggtgcctagaggactagaatcgtgtcctatttaactttgtgttcccaggtcctagctcaggagttggcaaataagaattaaatgtctgctacaccgaaacaaa

SEQ ID NO: 798 - DNA, 4190 bp, Homo sapiens; identical to SEQ ID NO: 186

SEQ ID NO: 799 - DNA, 1418 bp, Homo sapiens; identical to SEQ ID NO: 188

SEQ ID NO: 800 - DNA, 1538 bp, Homo sapiens; identical to SEQ ID NO: 189

SEQ ID NO: 801 - DNA, 2245 bp, Homo sapiens; identical to SEQ ID NO: 610
  misc_feature 293, 652, 819, 842, 847, 1010, 1657, 1701, 1707, 1869, 1875,1913, 1973: n = A,T,C or G

SEQ ID NO: 802 - DNA, 1470 bp, Homo sapiens; identical to SEQ ID NO: 191

SEQ ID NO: 803 - DNA, 3075 bp, Homo sapiens; identical to SEQ ID NO: 192

SEQ ID NO: 804 - DNA, 1100 bp, Homo sapiens
ctaaagctgggttggtagctcctacctactgtgtggcaagaaggtatgggtcatgaacagaaccaaggagctgcgctgctacagatgttaccacttctgtggctgctaccccactcctgggccgtccctgaagctcctactccaatgtggccagatgacctgcaaaaccacacattcctgcacacagtgtactgccaggatgggagtcccagtgtgggactctctgaggcctacgacgaggaccagcttttcttcttcgacttttcccagaacactcgggtgcctcgcctgcccgaatttgctgactgggctcaggaacagggagatgctcctgccattttatttgacaaagagttctgcgagtggatgatccagcaaatagggccaaaacttgatgggaaaatcccggtgtccagagggtttcctatcgctgaagtgttcacgctgaagcccctggagtttggcaagcccaacactttggtctgttttgtcagtaatctcttcccacccatgctgacagtgaactggcacgatcattccgtccctgtggaaggatttgggcctacttttgtctcagctgtcgatggactcagcttccaggccttttcttacttaaacttcacaccagaaccttctgacattttctcctgcattgtgactcacgaaattgaccgctacacagcaattgcctattgggtaccccggaacgcactgccctcagatctgctggagaatgtgctgtgtggcgtggcctttggcctgggtgtgctgggcatcatcgtgggcattgttctcatcatctacttccggaagccttgctcaggtgactgattcttccagaccagagtttgatgccagcagcttcggccatccaaacagaggatgctcagatttctcacatcctgcccaggatctcctcttagggtagaagaagtctctgggacatccctggggtgtgtgtgtagatttcccacctggggactctgctgtccctgggcttgcatcccagggatcccagagtggcctgcctatcacaaccacatcccttccccccacaaggcaataaatctcatttctttaaaaaaaaaaaaaaaaaaaaa

SEQ ID NO: 805 - DNA, 1562 bp, Homo sapiens; identical to SEQ ID NO: 194

SEQ ID NO: 806 - DNA, 4050 bp, Homo sapiens; identical to SEQ ID NO: 195

SEQ ID NO: 807 - DNA, 3091 bp, Homo sapiens; identical to SEQ ID NO: 196

SEQ ID NO: 808 - DNA, 2617 bp, Homo sapiens
  misc_feature 2141, 2311, 2452, 2496: n = A,T,C or G
atgcaaccagacatgtccttgaatgtcattaagatgaaatccagtgacttcctggagagtgcagaactggacagcggaggctttgggaaggtgtctctgtgtttccacagaacccagggactcatgatcatgaaaacagtgtacaaggggcccaactgcattgagcacaacgaggccctcttggaggaggcgaagatgatgaacagactgagacacagccgggtggtgaagctcctgggcgtcatcatagaggaagggaagtactccctggtgatggagtacatggagaagggcaacctgatgcacgtgctgaaagccgagatgagtactccgctttctgtaaaaggaaggataattttggaaatcattgaaggaatgtgctacttacatggaaaaggcgtgatacacaaggacctgaagcctgaaaatatccttgttgataatgacttccacattaagatcgcagacctcggccttgcctcctttaagatgtggagcaaactgaataatgaagagcacaatgagctgagggaagtggacggcaccgctaagaagaatggcggcaccctctactacatggcgcccgagcacctgaatgacgtcaacgcaaagcccacagagaagtcggatgtgtacagctttgctgtagtactctgggcgatatttgcaaataaggagccatatgaaaatgctatctgtgagcagcagttgataatgtgcataaaatctgggaacaggccagatgtggatgacatcactgagtactgcccaagagaaattatcagtctcatgaagctctgctgggaagcgaatccggaagctcggccgacatttcctggcattgaagaaaaatttaggcctttttatttaagtcaattagaagaaagtgtagaagaggacgtgaagagtttaaagaaagagtattcaaacgaaaatgcagttgtgaagagaatgcagtctcttcaacttgattgtgtggcagtaccttcaagccggtcaaattcagccacagaacagcctggttcactgcacagttcccagggacttgggatgggtcctgtggaggagtcctggtttgctccttccctggagcacccacaagaagagaatgagcccagcctgcagagtaaactccaagacgaagccaactaccatctttatggcagccgcatggacaggcagacgaaacagcagcccagacagaatgtggcttacaacagagaggaggaaaggagacgcagggtctcccatgacccttttgcacagcaaagaccttacgagaattttcagaatacagagggaaaaggcactgtttattccagtgcagccagtcatggtaatgcagtgcaccagccctcagggctcaccagccaacctcaagtactgtatcagaacaatggattatatagctcacatggctttggaacaagaccactggatccaggaacagcaggtcccagagtttggtacaggccaattccaagtcatatgcctagtctgcataatatcccagtgcctgagaccaactatctaggaaatacacccaccatgccattcagctccttgccaccaacagatgaatctataaaatataccatatacaatagtactggcattcagattggagcctacaattatatggagattggtgggacgagttcatcactactagacagcacaaatacgaacttcaaagaagagccagctgctaagtaccaagctatctttgataataccactagtctgacggataaacacctggacccaatcagggaaaatctgggaaagcactggaaaaactgtgcccgtaaactgggcttcacacagtctcagattgatgaaattgaccatgactatgagcgagatggactgaaagaaaaggtttaccagatgctccaaaagtgggtgatgagggaaggcataaagggagccacggtggggaagctggcccaggcgctccaccagtgttccaggatcgaccttctgagcagcttgatttacgtcagccagaactaaccctggatgggctacggcagctgaagtggacgcctcacttagcggataaccccagaaagttggctgcctcagagcattcagaattctgtcctcactgataggggttctgtgtctgcagaaatttngtttcctgtacttcatagctggagaatggggaaagaaatctgcagcaaaggggtctcactctgttgccaggctggtctcaaacttctggactcaagtgatcctcccgcctcggccttccaaagtgctgggatatcaggcactgagccactgcgcccagtcaacaatccgntctgaggaaagcgtaagcaggaagacctcttaatggcatagcaccaataaaaaaatgactcctagttgtgtttggaaagggagagaagagatgtctgaggaaggtcatgttctttcagcttatggcatttcctagagtttngttgaagcaagaagaaaaactcagagaatataaaatcaactttnaaaattgtgtgctctcttcttcacgtaggctcctgttaaaaacaaagtgcagtcagattctaagccctgttcagagacttcgcggatcacagctgcagctcaccgccacatcacaggatcc

SEQ ID NO: 809 - DNA, 1122 bp, Homo sapiens
ggcacgaggggtatttagagcgcagcggctgacgggccggatcgccttcgccgccgcccgcccgcaaaccttcgtgcccggcccgtcctcgcccccgcctccgccaccgcctcggcccgcagagcttgccccctccccacccgcagacatgtccgagtccaagagcggccccgagtatgcttcgtttttcgccgtcatgggcgcctcggccgccatggtcttcagcgccctgggcgctgcctatggcacagccaagagcggtaccggcattgcggccatgtctgtcatgcggccggagcagatcatgaagtccatcatcccagtggtcatggctggcatcatcgccatctacggcctggtggtggcagtcctcatcgccaactccctgaatgacgacatcagcctctacaagagcttcctccagctgggcgccggcctgagcgtgggcctgagcggcctggcagccggctttgccatcggcatcgtgggggacgctggcgtgcggggcaccgcccagcagccccgactattcgtgggcatgatcctgattctcatcttcgccgaggtgctcggcctctacggtctcatcgtcgccctcatcctctccacaaagtagaccctctccgagcccaccagccacagaatattatgtaaagaccacccctcctcattccagaacgaacagcctgacacatacgcacggggccgccgcccccagtagttggtcttgtacatgcgcagtgtcctagtgcccatcgtctgtttccccggccttgcccccgcccgccccgtgccgtggacatctgggcccactcatcgcccctccaggcccccggcgccccaccccctagagtgctctgtgtatgcggatgatttagaattgtcatttctctttactggatgtttatttataaagatctggcctgttcctgcgtctgcggagcggcccttgtctcccagctatctataaccttagctagagtgtcgccttgtgggttcctgttgctgagacttcctggatggagccgccctcaccgccgggcccgtggccctgcgcggagctgtgtccaataaagttcttggatgtgaaaaaaaaaaaaaaaaaaaaaaaaaaaaaaaaaa

SEQ ID NO: 810 - DNA, 1682 bp, Homo sapiens; identical to SEQ ID NO: 199

SEQ ID NO: 811 - DNA, 3480 bp, Homo sapiens; identical to SEQ ID NO: 200

SEQ ID NO: 812 - DNA, 1883 bp, Homo sapiens; identical to SEQ ID NO: 738

SEQ ID NO: 813 - DNA, 3812 bp, Homo sapiens; identical to SEQ ID NO: 202

SEQ ID NO: 814 - DNA, 502 bp, Homo sapiens; identical to SEQ ID NO: 203

SEQ ID NO: 815 - DNA, 7042 bp, Homo sapiens; identical to SEQ ID NO: 204

SEQ ID NO: 816 - DNA, 2185 bp, Homo sapiens
tttttaaattttgcatttgacttaaagtgccatgagaaaatttgcatactgcaaggtggtcctagccacctccttgatttgggtactcttggatatgttcctgctgctttacttcagtgaatgcaacaaatgtgatgaaaaaaaggagagaggacttcctgctggagatgttctagagccagtacaaaagcctcatgaaggtcctggagaaatggggaaaccagtcgtcattcctaaagaggatcaagaaaagatgaaagagatgtttaaaatcaatcagttcaatttaatggcaagtgagatgattgcactcaacagatctttaccagatgttaggttagaagggtgtaaaacaaaggtgtatccagataatcttcctacaacaagtgtggtgattgttttccacaatgaggcttggagcacacttctgcgaactgtccatagtgtcattaatcgctcaccaagacacatgatagaagaaattgttctagtagatgatgccagtgaaagagactttttgaaaaggcctttagagagttatgtgaaaaaactaaaagtaccagttcatgtaattcgaatggaacaacgttctggattgatcagagctagattaaaaggagctgctgtgtctaaaggccaagtgatcaccttcctggatgcccattgtgagtgtacagtgggatggctggagcctctcttggccaggatcaaacatgacaggagaacagtggtgtgtcccatcatcgatgtgatcagtgatgatacttttgagtacatggcaggctctgatatgacctatggtgggttcaactggaagctcaattttcgctggtatcctgttccccaaagagaaatggacagaaggaaaggtgatcggactcttcctgtcaggacacctaccatggcaggaggccttttttcaatagacagagattactttcaggaaattggaacatatgatgctggaatggatatttggggaggagaaaacctagaaatttcctttaggatttggcagtgtggaggaactttggaaattgttacatgctcacatgttggacatgtgtttcggaaagctacaccttacacgtttccaggaggcacagggcagattatcaataaaaataacagacgacttgcagaagtgtggatggatgaattcaagaatttcttctatataatttctccaggtgttacaaaggtagattatggagatatatcgtcaagagttggtctaagacacaaactacaatgcaaacctttttcctggtacctagagaatatatatcctgattctcaaattccacgtcactatttctcattgggagagatacgaaaagaggaaacgaatcagtgtctagataacatggctagaaaagagaatgaaaaagttggaatttttaattgccatggtatggggggtaatcaggttttctcttatactgccaacaaagaaattagaacagatgacctttgcttggatgtttccaaacttaatggcccagttacaatgctcaaatgccaccacctaaagggcaaccaactctgggagtatgacccagtgaaattaaccctgcagcatgtgaacagtaatcagtgcctggataaagccacagaagaggatagccaggtgcccagcattagagactgcaatggaagtcggtcccagcagtggcttcttcgaaacgtcaccctgccagaaatattctgagaccaaatttacaaaaaaacgaaaaaaataaggattgactgggctacctcagcatacatttctgccacattcttaagtagcaaaaaaggaaaagtgctttcctcctctgcaggatgtaaggtttatcagccattaaaacttagacttctctagcttttcactagctgtgaaccagccttcctgtccatggacgtgaaactgcatagtaatgagactgtgcacactgatgtttacaagattgaaagagtctttctccgaaaatcatggtaaagaatactgagacaatgaaaaaaaatcaacaaaatatgctttctggagaactgtaccttctatggtttgcttgcacatcagtagtttctgctgaacgtgctgtcataatgaagagatttccaagattttttttcctgattagaacgggtagccagtatattaaatattgatagaaaaataaaagaactggaaccagattcagaa

SEQ ID NO: 817 - DNA, 520 bp, Homo sapiens
cggcacgaggctctgcagagaagaggcaaagttcaacaagacaacaaaaatcagccagaaaatccaggaaaaggaagagcccttgtcatacccctctaccagagttctctaatcctaccttattctgcaaagtgccacttgactggaactcttcacctgcttgatttctgcacccaccatgactgagatcactgctgaaggaaatgcatcgacaaccacaacggtgatagacaacaaaaatggatgtattcctaaatcccctggaaaggtgctgaagaggtctgtcaccgaagacattgtgacaacattcagctcccctgaagcctggcttctggtcatcgctctgattatcacatggtcagctggtgcaatcgtgatgtttgatttagtggattataaaaacttttcagcaagctccattgccaagattggctcagatcctctaaaactagtgaatgatcctgtggaggagacaacggactggatctatggcttctttcctttggcatctggaatcatc

SEQ ID NO: 818 - DNA, 132 bp, Homo sapiens
cgccaatccccagaatccactgaccccacacacacaaagaaacaaacacaagtatgcatttccattttttacttgaattacaggacccatggctgagaaaataactatgttaaaaggttaaaaaaaaggaga

SEQ ID NO: 819 - DNA, 426 bp, Homo sapiens
ggcggacctctggttttggcggctgtgttttcgtgtgcagtggtgtcgtttactgaaaactgggcgctgggtctcgttgagaagctgagcgaaagatatcccttcacactgtccaagagccccatgtatacagtgggagcccctcacacgtggccttacatcgaggctgccttggtgtgactgcatcaagattcatactgccatgaaagaaagctcacctttatttgatgatgggcagctctggggagaagaaactgaagatggaattaaacacaataagaatgcttcttggtgaaaataactaatacgttctctcaagaaccgtctgatgtcattgaggaaactgaaagcttcattacaagcaaatgttcaaaactataaagctgaacagcaacagatgtggaatgaggaattgaaatatgccag

SEQ ID NO: 820 - DNA, 531 bp, Homo sapiens
  misc_feature 363: n = A,T,C or G
ggcaccctcattctctgggcatctctgctgcaagtggacaagagtatttcagagatcactgaagcctgagtccatgcacctgccaggagggggccattgtcctagggaccgcctatcacgccgactgcttcccgaggccccgggtgggctaaggggctgggtctgcttcaccaatcacccaacctgagtcccccagctttaccacagagctgccaacgtcctttcactgtctccacacgatggcccagtatccttggttgtggatagggtcatccctggctcctcacccagcacccagcttaaccctgccaccccacactcctgggagcactgggctgagggggtctcagctggtctggagtncagacctcgccatcccctgcccaccattgccgtggagggggctgccaggcatagctgctgtgagccatgtccttgtgtgtgtctgttcactcttaggagccacgcccaaggcgagacttccagccccaacacccactttggaagccctgtggccacatgtatgtcagt

SEQ ID NO: 821 - DNA, 1041 bp, Homo sapiens
  misc_feature 531, 630, 863, 864, 865, 866, 867, 868, 869, 871, 872, 873,874, 875, 876, 877, 878, 880, 881, 882, 883, 885, 887, 889,890, 892, 893, 894, 895, 898, 900, 908, 909, 941, 959, 974: n = A,T,C or G
gtcctttaaacaaaggtgaaaaaaaaaaccaagaacaagttctagcaaactgaagcaacctcttatgtacactagatgcttgacttaggaggagtttttaaatgttctcaatgttattctgtagtaaatggcactattatgaagccactagtcattccatatgagtcttaaggactgctctgtgtaacactgtgactgccctgtgtgcttagacacgtagtttcctcagtggctagcacccaacttactccgtagtgatattgtaacaatactgccattccctcgtactgcactgcccaatgtgtgtgtagcacaaacagttctcattcttaaggaccaattcagaactgaacagctatgcataggacagaaagatacatagactgcgggggtggggagacacacagcatcttgtcaacactgtgcactagtccacatttgtctcgctgaggtagacagcacttcaggaaggtgaggtgctacgtacactgctctagaccgtcgccattgatagtcggcctgtttcagtcnagctcagaaacagacacgtgacggagagacatcttaatctcagataaatgagcatgagtgtgcgtcttgttgctatggattacgcacgttgacaactangaccagaagcgttgtgattaaatggttgcgccctgaacaacatctacatgttccatggaaggatttcctcccccgaactcgattaagtggggaggaatctttgggccaattttttccagggggtggcgcccgggggtaggctgtttgttaaaccggcttggttgcggtaggcaggatgcttggacgcctttgacgtggggtggccgctttggggtccaaggctccttcctacnnnnnnngnnnnnnnngnnnngngngnngnnnngtngngggggggnnggggggggggacggggggcggggggggggtgnggcggggggcggtgcgcnggagggggaggtcgngcggggggcggggcggccggccgggccgggcgggggcggggggggggcggcgggcgcgcggcagtgg

SEQ ID NO: 822 - DNA, 549 bp, Homo sapiens
gcctgggaggatatgagagtctggctgagcttccagcaatcatgacccatgcctctgtgcctgagaaggacagagctaccctcgggatcaatgacacactgatacgactttctgtgggcctagaggatgaacaggaccttcttgaagacctggatcgagctttgaaggcagccacccttaaaagttcgagtcaaagctgtcattccagtgctgccatcaggagcagcatccaaggggccaaatcttcggaataactggacagatcattacggagcatacgcagaactgcactgaatattttaaggccctaatgagtttacagctgtaaccttccatggatcttcccttaagaactgtcttctgtttatcttctaactaacaggttgttctgttagtatcatttcggtaattttgctatatttgtgtccaaggaagtaagagttgttctgttttgggatcatgttgtcttttttctttcttcagtagcttatgatatattttaatcatgtttacaatgttacaatttagtattgatgttttatgaagtta

SEQ ID NO: 823 - DNA, 470 bp, Homo sapiens
tgttctttagagaacgtgtttaattttcacttagcaactagacgctacctttactatttaattttactaaaaaaatcttgcctttttctttaaaaaagccttcgttactaaattatgaaattgaaattgtatacataagaataataaaaatcagttaaagaaatgaacagtaacaaaacacctctggcttatcaaccttttatgatagaaggaaactcagatgtcactttatttatagagagctattaagtcacgtgccatgactctgtgaaggaatggcacattacaataaaggctaatgttttgaatgtgtatactagtaaagcaattaacagtaacctgaatttaaatgtcagtcgatggaagtacagcctatgacagggctttgaaaacgtttctacagtgaagcagttctacagagaacactaatgagcaatgtgtaaactgtttggaaggtgctggtgaataac

SEQ ID NO: 824 - DNA, 486 bp, Homo sapiens
  misc_feature 435: n = A,T,C or G
gttatattgtttctctaaaatcggtccttattacaggagggccaagatgctcagattaaaaagtattttacatttgagtcaatgcagggctctgggcagccctagagcggcttgtggcctttcttttgttttacaaacagtgcctgagaaagttttttttttccctgtgttcaagagaatttctttttaacagtgttgcagatctattcaaatgtttaaaataatgcttaaattcaaagagttttgcttctagtgaactgtaatcactagaaaattttgcctctaggtatggctaatgtaaccttacattatgtaagaaaaaattttattgtttctgcttctatacaagaagccaagagttttaatctttcagggtatattggttcttaagtgaaaagtattttattaactaatgcttcttaaagtttaccttanatccttgctctcacccaaaagattcagagacaatatccttttattacttag

SEQ ID NO: 825 - DNA, 259 bp, Homo sapiens
gtttcagaaggaataccccttgatatatcagaaaagatttcaaccactgagagtgaagcagcactttttgatgataaacctacaatcaagcaaccgatgctgaatttaagaaaccccaagcttcacagtctgcgttactgacttaaaacttcaacaaatgaagccgtacatgagactatttctacttaaaagaacactgttgatattataggttcccttcaaaggacattatacaaggaggtgacaaaacagtctttat

SEQ ID NO: 826 - DNA, 318 bp, Homo sapiens
ctaccatacgcatccgggtcgtgggaaaggcagggccagcatagaatgtgatggtgaaggaggtgtggggcacaaatgctctggtggagtggcagccgcccaaggatgacgggaacagtgagatcacaggctactttgtccagaaggctgacaaaaagaccatggagtggttcaatgtctacgaacacaatcgccacaccagctgtacggtgtctgacctcattgtgggtaatgagtactacttccgtatcttcagcgagaacatctgcggtctcagtgactcgccaggtgtctccaagaacacagctcgaattctca

SEQ ID NO: 827 - DNA, 526 bp, Homo sapiens
cgggcaccgagacagctgaataccagtcattgtgtcctcacggccggggctacctggtgcccagtggagacctgagtgcccggagagatgtggacgaatgccaactcttccaggaccaggtgtgcaagagcggagtgtgtgtgaacacggccccaggctactcttgctattgcagcaacgggttctactatcacgcacacaggctggagtgcgttgataatgacgaatgtgcggacgaggagcctgcttgtgaaggtggccgctgcgtcaacacggtgggctcttaccactgtacctgcgagcccccactggtgctggacggctcccggcgacgctgcgtctccaacgagagccagagcctggatgacaatctaggagtgtgctggcaggaagtgggacctgatctcgtctgcagtcgcccacgactagaccggcagccacctacaccgagtgctgctgtctctatggtgaagcctggggtatggactgcgctctctgtcctgcccaggactcagatgactttgag

SEQ ID NO: 828 - DNA, 437 bp, Homo sapiens
aattcggatcatggcaagggacccgcgcactgcgcctagagaacagcgacctgccttccccagcagcaaggctgtgagtggcaagatgggaccgggctcacagcgcgcgcttgtcctcctcttgctgctcctcgccagccccggagcgcgggctttccagagctgtctcaacaaacagcagctcctcaccaccatccgccagctgcagcagctgctgaaaggccaggagacccgcttcaccgaagcatccgaaacatgaagagccggctggtgcactgcaaaacacggttaacaaaatgaccccggatgcaccaccagtttcctgcccggctctggaggcccctccggatggcaagaagtttggaagcaagtacttagtggaccatgaagtccattttacctgcaaccctgggttccagctggttgggcccagcagc

SEQ ID NO: 829 - DNA, 531 bp, Homo sapiens
  misc_feature 437: n = A,T,C or G
cttcactgttctgcttcatgaattctccacacaggaaatcattccctgccgtattcacttggtctggtacccaggtaaaccccttaaagtcaattaccactgtcaagagcagcagagcccagaagaagcctctggaactatggaagcatcagctatggcaccgccagagttcggtaatttctaaagagaagaaatgatctgcttctattatattctaaacaccacggtggtgctgaactccacgagcatgcgcactttcctgattgggctccctgattgggctcggcaggctcagcacatctaccacatagcagatggatcaacaattgctttgggaaaaggtttcgtcttttttgttttgagtttgtatatttcattactctggacatattgtgggtattttatgatgctgaattgttcttattttgtcaactctnttttttcagtgaaagtaaatattaactgctaatctcaggcacatatttccttttagcgtgatacccactttcgaataagtgtttatatttctaa

SEQ ID NO: 830 - DNA, 736 bp, Homo sapiens
  misc_feature 565, 670, 671, 677: n = A,T,C or G
atcaaactaaggcacaatggctatgaccctagggtgatgaagcatcctacggacctggatgcatccaagattactcacgggcagtttgatgagcgctatgtgttgtcctctcgggtacgcactggccgaagcatccgcgggctgagcctgcctccagcctgctcccgagcagagagaagggaggtggagaatgtggccattactgccctggagggcctgaagggcgatctggctggccgctactacaagctgtctgagatgacggagcaggatcagcaacgtctcatcgatgaccactttctgtttgataagccagtgtcccctttactaacatgtgctggaatggcccgtgactggcctgatgccaggggaatctggcataattatgacaagacatttctcatctggataaatgaggaagaccacaccagggtgatctcaatggaaaagggaggcaatatgaaacgcgtatttgagagattctgtcgtggactaaaggaagtggaacgattaatccagaaacgaggctgggagttcatgtggaatgagcgtctgggatacattntgacttgcccctcgaaccctcgaactggattgcgagctggtgtcacgtttagatccccgagctcagccaggatccacgctttttctagatcttggagaacctgcnngctcanaagcgtggcacaggtgtgtggacacttgctgcagtggcagagtgtacgatatttccaac

SEQ ID NO: 831 - DNA, 529 bp, Homo sapiens
ccaggctctccttagctttcagcagtgggtcacgacccctgccttcctacctcacagggttgtgggaaccacgtgacagcggaggtaaaagctgtttgagagcagtgaagccacacagaccttgtgcagtgagaagctttgaagaatcaaagacccctgaagctgctgccggtacaggaggcgagggcggctgggaaagaggaactttggccagtgcccctcatgccgagccaagcaaaatggtgcaccccagccccagcaaatcagagttttgtttttgtttttgttttcaagtgacactctttccatttttcttagtttgggagaaagagcgagtatggcaggcgagagagatgagtaaaagtttcagaagcgtctcagccaatccctgctcctgaaggagagctttgcccttatgcaccaggcaagatggcctgctttcagcactgggccgcacatctctgttagcgctgactctcagccgggttagaaatgcaggacggctgagttttctgcccgcatttcagct

SEQ ID NO: 832 - DNA, 833 bp, Homo sapiens
ccaagtcgccacctcgggagtgaaccatggttgcagctgtggcgacggcgtggctgctcctgtgggccgcggctgcgcgcaatccgagcaggacttctacgacttcaaggcggtcaacatccggggcaagctggtgtcgctggagaagtaccgtggctcggtttccctggtggtgaacgtagctagcgaatgtggcttcacagaccagaactaccgagccttgcagcagctgcagcgggacctgggcccccatcattttaatgtgcttgccttcccttgcaaccagtttggccaacaggaaccagacaccaacagggagattgagaactttgccgccgcactacagtgtctcttttccaatgtttagcaagattgcagtacttgcacttgtgcaaccctgccttcaagtactaaaccagactcttggaggacccacctggaactttgaagtacctatggcccaccggaagttgttggacttggacccattggcaattgggagattaaccctttttagagggagtgttaacctcctctggaaagaaaatttttcggggcctttaaccgaccccggaaaaaggggcttcggggggggtaaattttccgtcccccgaggaattaaatggggtttccaagaaggagatatttgcgggggtttttaaccacacggggtcttaaaaaaggggtttaaaattgtgggggcccctcccgggtccttgggggggttttctcctacacggggtgttgggaccctttttgttaaatgttctggtgttgaaaaaagcgcccgcgccctttgtgtggtgaggaggtggaggaggcatgctagctta

SEQ ID NO: 833 - DNA, 464 bp, Homo sapiens
gaattcggcacgatgggtcttcccaagctgaatcatcttcatgtaccgatgcacatctgcaggcagggaggaaccatcaaagacaaagtcatccaccatcacattcagggtcagccttggtcgccagtgagagacgggttcatccagggcgtttgatggcttcttctcggcttctatctgttgctgtgtagcagactccccagtgagcaagttaatttcttctggtttggggatcatgtaggtagtcagagtactgaccacatgtacctgtttcccatcttgccagggtagaatcccagcatgatgtaggaaaatatatgcatacagcgtaccattgtttcttgttttctttggtacagaaacattaactgtcctttcaaatttggaatccacatcaaagtcttccacgttcaagatcaggtccacattgttctctgcaccaaggctggaccgtgtggtggtgt

SEQ ID NO: 834 - DNA, 352 bp, Homo sapiens
gtgaagaccgcagcctcctgggtctggggctaccttcgggtggcttccacgatcgctacttcattctcaacagcagctgcctacggtctacaaggaggtccggagtcaccggcctgagaaggagtggcctgtcaagagcctcaaagtctacctgggtgtaaagaagaaactgcggccacctacttgctggggcttcacggtggtgcacgagacagaaaagcacgagaagcagcagtggtacctctgctgtgacacgcagatggaacttcgagagtggtttgccaccttcctctctgtgcagcacgatggcctggtgtggccctccgagccatctcgagtgtcccgggcagtg

SEQ ID NO: 835 - DNA, 426 bp, Homo sapiens
tgtaaacacagtgttcgactgaagctagagtgcagagtcgcagcactgctgactgcctgcctctctgacatgtggctcttgtttcgtggggacttttcctctggaaaatactttgccttcaggtatttgattgaaatatttaagagtatttaagctttccagtatcctgtatcatgtgtaaatggaaaatatgtcttacaaatagagatgcactaaaacaacaaaaacaacaacaaaacaaacgtttacattctaggagggaaaaaaaacaaaagtctttgtaattttgcttaaatttgccagacacagatttagaaatacattctcactgtccaaaatcagcttaaacactggctctggcgatgagtcattgtgcaattagaatcatatcttatgatttattttctgtcattaaaaaaatgtaca

SEQ ID NO: 836 - DNA, 216 bp, Homo sapiens
cttactcctgggaaggtgggaagttgatatctgaaaacgatgactttgaagatatggtggttacaagagaagattatgaagaaaatggacatagtgtctgtgaagagaaatttgatatttaaaagacatttctgaataatagtcttggaaagtttatttcaaagttccgtttataggaggctaagacctaactatgttacttttcattgtaagata

SEQ ID NO: 837 - DNA, 542 bp, Homo sapiens
aagactctgaaaccaagtggcctgacaaagccctgctcatgctccctgcggtttgcctcagtcctgtagcaatgcacttagaacaatccctgaagacagggcgtcttacagccattccccagatgagcttcactgcccactttgttgtgtgttttacatctgtgacctcccttcatacctgaagcatgtatcacctccaaggcttgaatcgcaggactccttcccaaggttcactagctaaatagtggcagagctaggatttgcacctgagattcccttctgcctcagttctcttctttcagagttgctggacggacagttcccgggccccgtgacctaaaaccagcctggtctcccttttccaggaggctgagctggagcgagtgaagaaagtgcgagagatggagctgatctactcccgggcccagctggagctggaggtgagcaaggcacagcagctcgccgacgtggaggcaaagaagttcaaggagatgacagaggcagctgggcccggaaccatcagggacttggctgtggccggg

SEQ ID NO: 838 - DNA, 437 bp, Homo sapiens
ggagtccgggtccggcggctgatagcgcttatttagaagtcgtgtttgaggttatggctgataagctggtgcccagttccccggctgatgctgtagagccactgttttccttcggagttatagcagatattcaatacgcagatttagaagatggatacaattatcaaagaagccggcggaggtactaccgacacattctgattcactgacatggtgccatcgaagactggaataaagaaagcagcatgcctgttgtgtcctgcagcttggagacatcatcgatggctacaatgcacagtataaagtatcagaaaagtctctagaacttgtcatgaacacatttcagatgcttaaagttccagttcaccacacgtgggggaaccatgagttctataacttcagcagagactacttagcaagctctaaactgaacagca

SEQ ID NO: 839 - DNA, 537 bp, Homo sapiens
attcggatccttgctgtgcttaaggaaaaacatctttaaaataccaactaccgtctgaattaaatggtcttattttaaaaaatatattaaaattacagttttagggcagcacaccaccttcttttagacaattatactttgggatttacaggtagttcttttaaataattgttttaactggtgttttctttcagaaaatatttgttatagtaactttcagcaagcacatcgtggagcagatggtgactttcattggtgctgtccccggcataggtccgtctctgcagaagccttttcaagagtacctggaggcgccggcagaagcttcatcacagaagtgaagcgggcacaccacagggagaaaactggttatcctggatgtttgagaagctggtggttgcaatggtgtgttactttgtcctgtctattattaactccatggcacaaaactatgccaaacgaatccagcagcgcttgaactcagaggagaaaactaaataagcagagagtctttatctgcagaagttaacatggtgg

SEQ ID NO: 840 - DNA, 419 bp, Homo sapiens
cacaagtccttagactgcacagcagaacagaaggcatgatggcactcagcactcggacccaggctgcctgtctcctgcttctcctccttgccagcctgagcagcaccacctatctccatcaacagatgagacagactacagagctgcagcctttgcacggggaagaaagcagggcagacattgcgataccaatgcagaagagaaggaagagagacaccaacttccccatctgcatcttctgctgtaaatgctgtaacaattcccagtgtggtatctgttgcaaaacatagcctagagccacatcctgacctctctacacccctgcagcccctcaaccccattatttattcctgccctccccaccaatgaccttgaaataaagacgattttattttcaaaaagaaaaaaaaaaaacatga

SEQ ID NO: 841 - DNA, 495 bp, Homo sapiens
gcagagaatctggctatttcagtgggtataatttaaacttataaaagagattctgtacttttataaagatgtattttatataacttaaatactaatgctaaagtatactaggtttttccttgattgttaatttgttaattgcaacgtatgttgtagtttgcacagactttcacgcagaattcactttaaaacgtatagaatgcgtggtctaatagtttaaagctttgggaaaactttccacaaatcttacctctgaaggttcctcttgtgagtgccacgtggtgggctcctttcaccgccactcaagcattccaagttaaggggaagcagagtaccacggtctgtacgtaacaggctcagcagcagcaatttctcgtaaactctgtcctaagcctggtccttcttcatctgaaagcactactacaagcactccagtaacaagtggatactgttaagatgtagttgctgacactattaaacctcctctgctgtgtg

SEQ ID NO: 842 - DNA, 424 bp, Homo sapiens
  misc_feature 184: n = A,T,C or G
gaagaaatgagcctccaccaccaagaaatgaacttagagaaacagacagacgagaggtccgaggggagagagacgagagaagaacagtaatccttcatgaccgacctgaggtcgctcaccccagacaccctcgagagactgtgcccaatccttctagaccaacttcctggaaaagcgacggagntatgtccacagagaaacgggagtcacgagttgaaaggccagaaagatctgggagagaagtctctggacacactgtgaggggagcgccccccgggaatcggagtagtgcctcaggctatggaacccgagagggagagcgaggagtcattgctgacagaggaagcggaacacagcactaccctgaagaacgacatgtcgtggaacgtcatggacgggacacaagtggaccaaggaaagagtg

SEQ ID NO: 843 - DNA, 320 bp, Homo sapiens
ttcagtaagtgtataccgaagcaaaaattagtcacttgagtaacttggccgctaatatttaaccatctacctctgtttttaattttctttcctaaaggcagcttgagatgtcggtcctaaccttgtctttctttttcctctttggtagacttatgaatgtccatattacttcttttttcctaaatgggacaaagacataggcaaaaaacatggatcctaagtagaatcagatatttatctctttttctaaaaaaataaaataaataaatttgggtgtttttttttaatttgcttttatcagatatttatctctttttcta

SEQ ID NO: 844 - DNA, 432 bp, Homo sapiens
  misc_feature 185, 186: n = A,T,C or G
caagctctctggacaagatctcagaggagcagagggcagattgctgagtatctaacggtagagacatgcatggaacccaatacagcaagagcctgaagtttaaatctgtcagaccggaggctggacaagtggacaagatgtggctggagcgataaggtggtgggctggctcaggccttggctggnncaccagtgagtaaggaaccttggaaacataacaagttgccacagagttcttaccatcatgttctgcaccaaagacctcggtttgtagaagcccaaggaaactgcagagggctcctgacttgagagaccagatggagccactatgttgtcacccccagtcctagctgacggtatatctgccaggttccggagcagtgtccagccatatataccggtgtgctttaacctgctgtgtgagcatattgtt

SEQ ID NO: 845 - DNA, 497 bp, Homo sapiens
  misc_feature 324, 335: n = A,T,C or G
atttgttcttcttctccaatgcatcccttctcaactcactgatggaacgaggtcaaggccgacctttctatcaatggtctcgagccgtccaaatcagaaccaacttggatcttgtgttggattggcttcagggggccgggctgggtgacattgccactgagttcttccggaaactttccattgctgtgaacctgctatgtgtgccccgcacctccctgctcaaggcttcatggagcagcttacggactgactaccccaccctgactccagctcagctccaccatctcctcagccactaccagttgggtcctggccgtggtcccncaccagcctgngacccaccacctgcagagcgggatgctgtggacacaggggatatctttgaaagtttttcctcgcaccctccgctcatcctgcccctgggcagctcacgcctgcgcctcaccggccctgtgacagatgacgcattgcatagagaactgcgcaggctccgtcgc

SEQ ID NO: 846 - DNA, 477 bp, Homo sapiens
cggtgtgctactgcccagccaagtgatttgaaattttaaagactgtcagcagtagctacagctcaatttataggatacaggctctgagtctcctgggctgggaactactcatctcaactcatctcagattaggaagtatttggcagtattagccatcatgtgtccctgtgataaattcttgtatcactagataaatatgacgtggctcaaagtggccatttggtagctttggcatcaaatataaattatatgctgcctgccttttcagtaattttccctgattaagattagcacaattcaatgctaaaatcccaaattagatcaagagaatatttcagcttcgatgtatagtcaaggaaatggacagatacctaggagaaatttgtgtaataattatttaatatatatttgaggtgttaattttaatatactaaatatgattttgttgtagattgtgtgtggacttttgttgtatga

SEQ ID NO: 847 - DNA, 497 bp, Homo sapiens; identical to SEQ ID NO: 845
  misc_feature 324, 335: n = A,T,C or G

SEQ ID NO: 848 - DNA, 477 bp, Homo sapiens; identical to SEQ ID NO: 846

SEQ ID NO: 849 - DNA, 422 bp, Homo sapiens
ggattaaagttgtgtagcaccacacaaggctaatctgattatttttaaaaaaatactcatggtagttactatagcaaatacaaatcaaattaaattcatatagccatgtgactaccagttgcaagtagtcgggtagaagtaggcatttcctttcttccaggaatgtgtgtgtttaaagtttttgaacaagtcacatagccttactagcaaaagttaaatggctcaagaagtgattatacttctgtcgaggtgggatttgtgtgatggaacatcacttacagtgggtgattggtaatttttttcattgttagtatttgtctctccttaaatattgtctcttgagtaaaacttgctgtaatgatgacatatctacctacttatttttactttcagtaaacatggagagcccagtccattttact

SEQ ID NO: 850 - DNA, 272 bp, Homo sapiens
ttcggatccaacctcaaccccagaccacaggaccggttctgcccaacccttttgaactacttggtcttttgagacctcgcatcgaagatggctcaggcaccaacagttatcgtgactcaacctggattcgttcgtgctccccaaaattccaactggcagaccagcctgtgtgattgcttcagtgactgcggagtctgcctctgtgggaccttttgtttcacttgtcttggatgtcaagtggcagctgacatgaatgagtgttgtctgtgtgg

SEQ ID NO: 851 - DNA, 410 bp, Homo sapiens
gcagcaagaggatggaaggatgaatagaagtagcttcaaataggatggagatctcatcaggcttgctgttcctgggccacctaatagtgctcacctatggccaccccaccctaaaaacacctgagagtgtgacagggacctggaaaggagatgtgaagattcagtgcatctatgatcccctgagaggctacagataatccacctagaatcaatactgaagcacctacaaccctgcactcctctttggaagctcttcagtgcaaggaagacctctgaccttccttgattctctgttttcatagcaacaactataatgagttcaacctctgacttgaccactaatgggactggaaaacttgaggagaccattgctggttcagggaggaacctgccaatctttgccataatct

SEQ ID NO: 852 - DNA, 440 bp, Homo sapiens
ccaggtgtcatgcactccatagacaccaatccttgttcccaaggcagacattattaatcaatctcagcactagttctcaatttaatccaattatatttttccacagtacttcacatctcttatgacctgttggtcatcagttagaattgagagagataaacactgtttgtaatccctaccttagaaagaaaagcagaggagaatgggggaaccaccagcataaaagttattatctggggaaaatcgacctgaaagaacgcccaagtccaagacctatggtgctgacaccaaagtaacactttcccaagtgtaccccagaccccactcttctccctgtggccaccactccctgcttttcaggagttgtgaaaaagatctccttcacccttactgtgccccatattagacaaggcttgtttagtgtagtccttgttaaacag

SEQ ID NO: 853 - DNA, 211 bp, Homo sapiens
tgaaattaaaaaaaattacccacacaattttctaacacacgtgcccagtaatgaatgttaagactctcccacagtcacagtctcattttcctgaagcatatcataagaaatgaacaagaagtccagcattataatgatcactcaaataaaatgtgaggattggaattagaacattcataagaaaatatgacccaacatttcttagcatgac

SEQ ID NO: 854 - DNA, 615 bp, Homo sapiens
  misc_feature 403: n = A,T,C or G
ctgctgtcttatctcccagctacagggtggccctttatctctcccagcttcgctggtacttttagcttctgcagcttcttagcttgtgagacccccgctgaatgggggccccttgaggcctgagggattctctcccgataagccttggccaacttttccactctggaccctcacctaggacccaacctcctgcctgagcctgagccaggaccccttcctggggaacgcccaggtacctttggctctcaccgtcctgccaacatcgagtctataaatttgcaagagccagagggagggagctgccatccaggcacagccgagaacactggagccatgacaaccagtcaccagcctcaggacaggtataaggcagtatggcttatcttctttgtgctgagcctgnggacactgctcccctggaatttttttatgaccgcaaccaagtatttcacaaaccgcctggacgtgtcccagaatgtgtcctcggacactgatcaatcatgcgaaagcaccaaggccttggctgaccacacagtggccttgccagcccggagttctctcagtgccatcttcaacaatgtcatgaccctgtgtgccatgctgcccttgctggtc

SEQ ID NO: 855 - DNA, 411 bp, Homo sapiens
agcctcactgctgtctgcatgtggcctgccaggatagccgctgctgccggttttggtcgcctcgaggattgtgtgtattcccctgctgatgctctgcaacgtgaaggctcgccagtgcggcgcgcagcgcaccacttcgtctttaagcatgacgcctggttcatcgccttcatggctgcctttgccttctccaatggctacctcgccagcctctgcatgtgcttcgggcccaagaaagtcaaaccagctgaggcggagacagcaggaaacatcatgtccttctttctgtgtctgggcctggctctgggagctgtgttgtccttcttgttaagggcacttgtgtgaccctgtggggacagaagaactacactgcctgcttcctgctcacttccttccctgccagggacgagc

SEQ ID NO: 856 - DNA, 964 bp, Homo sapiens
  misc_feature 538, 568, 574, 619, 830, 903, 928, 929, 930, 931: n = A,T,C or G
ctcagacctcgtcagtgacccatctgcccattgagaacttgaagccaaacacaaggtattacttcaaagttcaagccaaaaaccctcatggctatgggcctgtcagtccttcagtctcatttgttacagaatcagacaatcctctgctggttgtgaggccaccaggtggtgagcccatctggatcccattcgctttcaagcatgatcctggctacactgattgccatggtcggcagtatgtgaaacgaacatggtacaaaaagtttgtgggagtcgttctttgtaattctctaaggtataagatctacctcagtgacaatctcaaagacacattctacagcattggagacagctggggaagaggtgaagacactgtcagtttgtggattcgcactggatggaagaacagggcctcaatcttatatagaagccctcccaacattcaaggctactatcgccagttaccgccagagcctgtcactttggcacattggttttggaccccctattactatgtgggttggtacgatgtggagcntcgacccgaggaagttgtacacacagatgngcctgntgaagtctacctccacgtgtgtactacatcggctaggatttgcanagaagacatgtgacccggtccgagttgctagagcacagtgcctgcattggctctcacagatttgccatcttgcttataaatcaatagtttcgacctatcgcttcgttcagtgtttataacttgagaagacccgacggggggtcgttgggtcttgcctagagaaaaaagggtgttgttggcaagaggtgagctgagctatctacttctgtcnctggagctggacacctgctacctggcgttttctttttgccccggtggaacacgcgtggttgtacgccccctgncgagagtggcgccccctgactagannnngaggggatgatcttgtttgttatgtttatattt

SEQ ID NO: 857 - DNA, 498 bp, Homo sapiens
  misc_feature 231: n = A,T,C or G
tattgccctgtttttcctattagaattgatccccactgaggtaaattttataatcatgttttgtgtatttttcctggctcgccaaggcttatgaagaaatagcagccattccctgacaggtttgcgctcccaccacagagaggctgagcaagatgatcagaggatcaaggccagccagagcaaggcactgcccagaaagcacaagtcctgtgctcagcgttttgcgtacgnttttattcctaattgaaatgtaatatttcagaagctagcagcctcgctcagtctagaccttccacaccaatctagcagcgattctcccgtactaaagcctttgtaagagtttacggttcttcctcagtgaaaaatgatcttgtttttcttacagccggatccaaagacgctagatgttaagggctgaggctgaagcccggtgacgggcgctcacctgtcatggtgcagccctcgttccaccgtgagcaccagcaagagacaaacaca

SEQ ID NO: 858 - DNA, 377 bp, Homo sapiens
gaggatcaggaatgtggggtgagctgcaccgcaccctgggccaagatagatgcacagtgcaggggcagcttgtcattcccaaaacactttactccagaaatgtcagctctccccgtcagtgactttgctccagaaagagaaagaaagtgagctgaaatccaaacctgtaagttctcgaaattagggaacctccccccttgatcccttgatactgtcagccccagactacatcgtgagaagggcagagtgtgtgcgttcagtgtgtacagcttgtgtgtgtcctgtcctggcatatctgtcatgtgacagtctccccagggctgaggggtactcacccactctgcagctgcggactgctccacaccggggctacgggg

SEQ ID NO: 859 - DNA, 506 bp, Homo sapiens
acttattggatcaaataatcttcagcatatacatgtgatagaaagtagttcaaatacttacgttgatgtacacttccattttatgtattaatgctaatatttccataagttaccagcaaattactgcaaaaagcctgaatctgtacaattttatttcagtcagaaacaactgataatctgatatatgtcaagtgataaatgtctttttcttctgtacccatactacagatactttctcaagctcttcctttaagcagtttttttaaaacggctctatggttctattcaagctgtatgtagagactgagtgtgatgtcagcatgaaaagataatgcatggtgagaagctattgttttataggatatatgatatatttatatgcttaggccatgaatgaatgtattacagaatgtttttgtgaaactgtttacttaagctgtaacaagatagactcatttcatgggggaaaaaaaaagcattgctttccttcatgtgtgggagggagc

SEQ ID NO: 860 - DNA, 605 bp, Homo sapiens
agatgtcctgcctgtgagtagagcggaccctggatgtcctgaggggtcagatctcagctcactcttctctgccttaggaattagagtgggtggacccgtgtggccccatgccctgtgatctcactgaaataggctacttcatttgtttcctgctgttgcagaaagccagcaaacctcagcctgaactcttaggtgacattgccattgctttaaggacctgcaggaagaaaactttgacatcaatcagctctatgactgcaactggattgttgtcaactgttccacccctggcaacttcttccatgtgctgcgacgacagatcttgctgcccttccggaagccgttaatcgtcttcactcccaaatccctcctgcgccaccctgaggcaagaactagctttgacgagatgctgccaggaacgcacttccagcgtgtgatcccagaaaatggacctgcagctcaggacccacacaaagtcaagagacttctcttctgcactgggaaggtgtactatgaccctcaccgagagcgcaacgcaggacattgagaagaggtgctattacaagattgagcactatcaccatccgtttgacctcgtgctgaag

SEQ ID NO: 861 - DNA, 691 bp, Homo sapiens
aattcggaacgaggtgagcagctgtcgtcggctgctcccgcacgtcctggtcccgagctgcccgccgctgacccgcacactgcggctcttccctctccacctcatgaagccgttggtcgtgttcgttttgggcgggcccggtgcgggcaaggggacccagtgcgcgcgcattgtcgagaaatacggctacacacacctttctgcaggagagcttcttcgtgatgaaaggaagaatccagactcacagtatggtgaacttattgaaaagtacattaaagaaggaaagattgtaccagttgagataaccatcagtttattaaagagggaaatggaccaaacaatggctgccaatgctcagaagaataaattcttgattgatggatttccaagaaatcaagacaaccttcaaggttggaacaaaaccatggatggaaaagcagatgtatcttttgttctgttttttgactgtaataatgagatctgtattgaacgatgtcttgaaaggggaaaaagtagtggtaggagtgacgacaacagagagagcttggaaaagagaattcagacttaccttgaatcaacgaaaccaattattgacttatatgaagaaatggggaaagtcaagaagatagatgcttctaagtctgttgatgaagtttttggtgaagttgtgaagatttttgacaaagaaggc

SEQ ID NO: 862 - DNA, 234 bp, Homo sapiens
tacgggtgaagagacacagctttattgtataaaagctgagccaggaggtttaaatcagggacacaccatcaagggcatacacaagagtctccagtttatatgtaagtcctcaccagttacccataaacatctagtccccctcaacgtcaaatgtgctttgttctcttcatgccagccagttccctatagggtctgccactgtcacaaaacagaaccctttgcaggacacaggat

SEQ ID NO: 863 - DNA, 563 bp, Homo sapiens
aattcggcactaggtggcttcctactttcttccccctgtgatgctgcctgcttctagattttacccttctatgaaatgcagacctcgaggttgcctgggaagcttggtgaaggaatggtttaccttccttaacaggatagtagaacatacacagagtatggaaacctaaggagatttcagtgaagtggagttactccaagtgaaacgctgttttctggttttagccaaactgcaattagatgtgtctttgcaatctaaaagttgtacacaatcaacaatacactttgcttactcctcagcagcacattctgagggagaaacagtcacacccccgcagaaagcctggttggacttccgaagacagaggcggtggactgacggatgggtgagagagaccaacacgacctaggcatgcatgctgaaggggaagtgtgtccattcctactgcatcccatcttgtgtgctcctgtctggatttacggcagtgtgtcaaatgtaaatctctcaaagccatttaaaaatactcactttagttatggatgaagaagaggagaaaagcagtc

SEQ ID NO: 864 - DNA, 554 bp, Homo sapiens
attttttaaggtatgttccctgtttgcactcagggttaaagtgtcagactaaatttttagaagaaaacagaaattcaggtgtgtgttcattataggttattcagcaaagtggaccctgacagtttctcggtttccccagtgctgaagacagcattgccatccaaagaaactcacattttctttaaagctatcacactttgtcttcttatcccctgcttcctgttccttcagcctcccttccctttccttcctggatctctgattatcttgtgatcatagcacctgctgtcggcacactcccgtgagtcctgtggtcagggtttcaggataggaggtggaggtttgggttaacgtgggaaaatgttcttgctttgacacaaggaagtactgagtggctgcaccgagaaaggacttggctagtaaggttagaatgtgcatcgcgcatagccgagcagcctgctagcaggtgacacactccgtgggggaggctcttctccccttctttctctagtctgggtggtgaacgggctgacactgctgtcactggttcttag

SEQ ID NO: 865 - DNA, 438 bp, Homo sapiens
cttcttaagagagaagagagaggaagtcaggggacacacaggctgagtggccgtgtggtagttctcctgtctgtgtataaatatttacatgttctgtgtggtctgaatgcagaagctcaaaaagcttgcaaaaaagaaaaaagaaaatgtttctttgttgagccgtgtcttgaaggcaaaagagaaaatgctctactagtctttccttcattgttcttagttgagctctgtgcgtgaatgcttaatttcttttgtttatgacggttttacttaattttaaagatatatttgcacaaaacctttgtttaagatctgcaatattatatatataaatatatatataatataagagaactctgtatgtgggagagcaggagtatttttgtattagaagaggcctattcaaaaaaaaaaaagttgttttttgaactagaagag

SEQ ID NO: 866 - DNA, 611 bp, Homo sapiens
  misc_feature 532, 541: n = A,T,C or G
actatgaggtctcagtcaagttcaacgaggagcacatacctgatagccccttcgtggtgcctgtggttctccgtctggtgacgcccgccgccttactgtttctagtcttcaggagtcagggttaaaggtcaaccagccagcatcttttgcagtcagtctgaatggagccaagggggcaattgatgccaaggtgcacagccccatcaggagctctggaggagtgctatgtcacagagattgaccaagataagtatgctgtgcgtttcatcccacgagagaatggcatctacttgattgatgtcaagttcaatggtactcacattcctggaagtcccttcaagatccgagttggggagcctgtgcatggaggggaccaggcttagtgtccgcctatggagcaggcctggaatgtggtgtcacagggagcccagcagagtttattgtgaacacaagcaatgcaggagctggtgccctttcggttaccattgatggcccctccaaggtgaagatggattgccaagagtgcaccgantctaatcgntgtcagctatagccccatggcacctggcagctacctcatctccatcaagtatggtggccctatcacattg

SEQ ID NO: 867 - DNA, 441 bp, Homo sapiens
attcggaacgaggcagctctgctccagtgatctgagccaatttgctcaaattgccactgtgaatcttggtcaagccatttcattgcccatagaatgactggccaacagtttgaaaagcagtggtaggtctagaagggtcagggcctctgtatgaactgtgcagtggactgggatgacactagaactgagaggaagcaccaaatgtcatcccagctgtgatgttgcagaagggcagatcccaatccatgcttgggtggctcttcctagggacaagggatggaagagattttgataccagtgatctaggcttcagtctgtcctgggatagtgcccccagtccttatgaagtaatagccttaagcaagtctctcagagtcccacacctgactctgaatctttcttgttctagccatggcactgggcctagagctttgtttggcc

SEQ ID NO: 868 - DNA, 421 bp, Homo sapiens
ctcatgggctgcttgggtgtcaccagagaggagggtaaagccaacaccaggaagcgccacacccccagaggaaatgctgaaagttcttcttctaatagacagcccaggaaacaaggatgaacggctgactactcaagacagttcctagacatgtgggaattttccctcaccaaagagcaattaaaaacaaaaaacatatagtatttgcactttgtactttaaatgtaaattcactttgtagaaatgagatatttaaacggactgttgtgatctgtgaaaacggaaggctggcttcgggaaattaatcacatacaatgtatgtgtccttgtttgaccttcaagatctgtgctggtggggtgggttttaaatgcatttcaacttcacttcctcgtccctctgtggagggcctggtttattccc

SEQ ID NO: 869 - DNA, 448 bp, Homo sapiens
tcggcacaggggaagcccggcctgtgagcgttctggatcggctgcaagatgagcctgcggcgtgacaggtgaaatggtgatgagttacgcaagctgcacagataattaagtagcagagattagaactcaggtttcctgcctcccaaggttgttaaacatgagcctgcgaacaaacccctagcgacttcttaaagcagatcatcggacggccagttgtggtgaaattaaattctggcgtggattatcgaggggtcctggcctgcctggatggctacatgaatatagccctggaacagacagaggagtatgtaaatggacagctgaagaataagtacggagatgcgttcatccgaggaaacaatgtgctgtacataagtacacagaagaggcggatgtgaagacaccaggaggcagtgctcttcagagatggatagatgaagtggttttg

SEQ ID NO: 870 - DNA, 511 bp, Homo sapiens
ctcaggtcaggtggaggacagcagcctggtggctaatgctgagccagtagtgggacaagccctcccacctccactcctggaccttttgcagtaatcactcaggggctggcgatgccttggtgtctcagaactctcagtgttactgatcagggatatgaggttgctgtctggggtaggttttctgagggaagtgggtggggcagcaagctgattttccttctgtcttcctttgttaatgtgggattttgagcaggtcagggtgtatcagtgactccttgctattccagaaactttgcttttcttgcctttggttagaaccagcctgcttatatagggtgtgtttgctgcgtgtcagtttaagggtgtggaggggttgcagtgcacaaaaggtggccagaggttgattttagtttgttacaattgtcctttctgggggctgaacaactggtatcaaccaagcagagactttggtgctggttgaaacagagctacagagcttagtactgagttt

SEQ ID NO: 871 - DNA, 531 bp, Homo sapiens
  misc_feature 153, 447, 448: n = A,T,C or G
ctatccctcgtttgtaatcacagctgggctggagacaagtctaccaagattgttgccctttgaggaaggaaaccctgggttgaatttgagccccaagcctcctctcaagccatcagggggttatgggaaaggctggtttatctgctggtggcngctgcgacctcagcttcctagtgccttgccctccctgttgcttggctgagcagtctctctgcagcctgtgctccgcttctcctccagtccatctggaggagacatggcgatacctcgcacccttgactgatcacagaggtcagtgctgggtgaagaagggaggacctgcctcacactgtttggggatcgggccgctgctggctggatgggtgtggaatgcctcggtgcctaggaaccaagccaaggaaagtgagcggttttagagactgccttctcaacacccggtgctattannatgccaccacgaatgatttactagagaattgagaatcaacatgattaatcaaagcagtgttctgggcttttgagtagcccagg

SEQ ID NO: 872 - DNA, 477 bp, Homo sapiens
  misc_feature 455: n = A,T,C or G
gctcctccatcttcacaagtagtcctacctgctccaaccgggatcattcatcagggagttcaaacccgtgcttcaagccttccacaacaattggtcattgcaccccagagtaccttggtaactgtgcctccccagccacagggagtagaaaccgtggcccaaggggttgtttcccagcagttgcccacaggcagtcctctgccctctgctagcactatttctgttacaaatcaggttagttcagccgctccttctggaatgccttctgtcccaacaaacttagttccaccacagaatatagcacaacccccagccacccaaaatggcagtttggttcaaagtgttagtcaatctcccttgatagccactaacataaatttgcctttggacaacagataccactaagttctactcagttctctacacaatcattagctcaggccattggaagccanatggaagatgccaggcgcccag

SEQ ID NO: 873 - DNA, 398 bp, Homo sapiens
tggttggtaaaagatatgttccggagaatataggaacatgcccggagagacctaacctgtatgtccactttcatgctcttgttccccaaacccctgagcattgttgtctgctcaagagattctactggaagcatgatgaccacctgtctgggaagagaaaacctcaagaaggcaaagtgcagtgcgtgtttgtggtcaagatgagggtgttaagggatgttggagtctggtgtagagacaggcaggttgcagaaaagcacagatctttgccagtggttggccctgattgaaaacctgtttgaaacagactgtgtaggaaaaatcaggattaaagagtgctgcctttatggctccttcttcagaataggtgcagaccctccccgtgcccgttccctgcc

SEQ ID NO: 874 - DNA, 441 bp, Homo sapiens
aagtgtccgggcggggcgtcccgagcgcgtgggcctgcgggtcgggtcaagaggtagaaggtgctgcgcgtgatccaggatccgaattggcccggagcaggagcatggcgtcgtcggggtcggtgcagcagctgcccctggtgctgctgaagttgctgttggcgagtgcggcacgggccagactctacttccgctcgggccagacttgctaccatcccattcgcggggaccagctggctctgctggggcgcaggacttatcctcggccgcatgagtacctgtccccagcggatctccccaagaattgggactggagaaatgtgaacggtgtcaactatgccagcgtcaccaggaaccagcacatcccacagtactgtggttcctgctgggcccacggcagcaccagtgccatggcagaccgaatcaacatcaagaggaaag

SEQ ID NO: 875 - DNA, 464 bp, Homo sapiens
aattcgggacgaggggattcgtgagttgggagagggtcactttgggaaggttgagctctgcagatatgatcctgagggagagagcacaggggagcaggtagctgtcaagtccctgaagcctgagagtggaggtaaccacatagctgatctgaagaaggagatagagatcttacggaacctctaccatgagaacattgtgaagtacaaaggaatctgcatggaagacggaggcaatggtatcaagctcatcatggagtttctgccttcgggaagcctaaaggagtatctgccaaagaataagaacaaaatcaacctcaaacagcagctaaaatatgccatccagatttgtaaggggatggactacttggtctcggcaatacgttcacgggacttagcacaagaaatgccttgttgagagtgagcacaagtgaagatcggagactttggtttaacaagcaattgaa

SEQ ID NO: 876 - DNA, 445 bp, Homo sapiens
ccttggagggccagaggtggcaaagggatagaaatgtccactccctgccttcttttacccctttaacccactgtgtgccacagacccccaaagggcgacacgttgaatgttcagaccaatcagataagttggctggatgtctcttcacattccagaagacttggaaatgagaattctgccaaaagtggttctgtaaccgatgatctgggtgacagattgcagttgaaaacgtcatctattgaacctctagatgtgacgctaaatttccgatcagagaaactactccttcgtattagaggttcactcattttttccagaaataacttgattgtttctttcttttctgggttcgtacttgtcaagttcagaacctttccgtgcacttttacggtggaattgctgagcccaaaccagtagaagaaatcaaacagggcatctgccttga

SEQ ID NO: 877 - DNA, 413 bp, Homo sapiens
gcaaatcatcatcttcagtgaggccctgggaggaggaggccgaggtggcgcgcagctgattacgtgtacaagaacagcatcaaggtgagctgcctagggctggatggggaatctccaaggcaacccttgccggtttgcgctgacctctagagggccagaaggtgggatccagcgctacgttctgcaggcttcagaccctgctgtcagtcaagcctggataaagcaagtggcccagatcctggaaagccagcgtgactttctcaacgcattacagtcacccattgaataccagagacgtgagagccagaccaatagcctggggcgaccaggagggccttgggtagggagcctgggagaatgcggcctggagacctggcccaggcagcatgcacacacccatcaatggctctctc

SEQ ID NO: 878 - DNA, 428 bp, Homo sapiens
agaaagttaaaaatcaatcctatcttcaaataagaatttcttagattccctatggagatgtgcattgtgagttgagaaattctcaagtgcaaacacttctggtttactttaaaaaaaaatagtggaaaacttactaactgtgaatatgagaaagacaaaagaaagtgagtcctctcgctagatatacctagcataattcattatgaaacaaacaaacctcaaactactgtattttggtgtctgtaccgcaagcatatgcctcatgactataaatgttacatacatcatttgctctctgtatagtaggcattgacttaaagggattgtttgttgtcttctcatggttgtatatatcaggtaaaattgttccaaagagccatgtgttatgtaatggggaacactttgatactgaattactaatttgtact

SEQ ID NO: 879 - DNA, 396 bp, Homo sapiens
gcctacttgcagcaacagcacagtgtgtgtgtgatgcacaggccctgagttctcaagagagagggaggggctgctgctcctgctgatcacatcagcctcacacacttgccctggaactgttgaaatggagtgactaccaaacacctctgtagtgtacaactcggctgggtggaaatcttgtctgttttgaagctatcaggtcatcactgtgggatctgctggtgagagagcttaccaggtgaaaatctgggtatatggatggtagtgaactgtcacagggggtgactttaacaacattcagtttcagtaaaaataaggaacagaattgggtcagtattctactacatggctgtacaggtatcccaaaacattgaggaacattccaagacagtgtgc

SEQ ID NO: 880 - DNA, 226 bp, Homo sapiens
tatactctattctgcatacagtactttaaatgccaatgacagtgcaatctttatttattgtaatgttaaatgtacttattactaatgtgccctcctagcatgttatattttgtgtgttttatactttttgtaattttaggtcagtttagttccttggcaacatctgtagtattagccttctgacatctttcttgtgtttttaaagataagagcatctaactcatta

SEQ ID NO: 881 - DNA, 426 bp, Homo sapiens
gtccttggctttagtgaacttgatgttccaccttcacagccaggtctccctttggaatgaatttgtggtgaggcttttacacaggactgtccacactattcactcctgatggagtgggctggagcacaagtgagaagatgaggagagaggtctttccctgtgccctctggatagatcagttctcacatccttgcttctagccactggctggccccagcccgtaagaaaacatgacatgtaggtgactaactgctaacaccagcaccctttcctggaagcagctactccagggaagcagagacatcagtgctgctgctgataatgcaagtgtttccatgccatggttgctgggtgtttgtcagtgtcccagggagtgttcagtctggacacggaagccctgagtcaccaatgttttccagttaatac

SEQ ID NO: 882 - DNA, 501 bp, Homo sapiens
tgttaccattgtctattaaagcacatggccacatatgtgtacctacctgaactttgtattttgggtccagcgtattgctcacatgttgctgtcacatgttgctgaaagatgctaataaaaaaaaatcaatccaaagaaaaatggaaagacattcctatttatagaatgattgtttcgtttatataaaagcataacttaggagttctaatagatgaaaagtctaataaattataaagtgattgatttgaatatattgtatttttataactttccttgccaaagcccagacctagttctttagagagtagttttcctcccttctcctccaccatttgtcggtcttccatgagaacaaagagataaaagggttaacaagcttgacaatttttttattcctaacattttaaaatgtatttcgaattctttgatctgatattcactaggataaacatccttttcatagacgctcaatgacctactttactgaaagtcgaattggtc

SEQ ID NO: 883 - DNA, 513 bp, Homo sapiens
ctcagcaggaactggacaccgttgtgaagagccagcaggagattctgagacaagtgaatgaggtgaagaactccatgagtgaaactgtgcggctggtgagtggcatccagcacccgggctcagcaggcgtctacgagacaactcagcacttcatggacatcaaggaacacctgcacgtggtgaagagagatatcgacagcctcgcacagcgcagatgccatctaatgaaaaaccaaaatgcccagacctaccaccattcccgtcgtgtctatccacgatccactttgtgatatttgtagtggtgcagacagtgttgttcgttggctatatcatgtacaggactcagcaagaagcagctgccaaaaaattcttttgaccttcattttcctatatgtacatcatctgggctagactttcgctggcttcaagacaatttacctcttactaaagtaatgggctcgtttgctatgggatccagaacaacactgtttagtatgtcttccaaaattgttg

SEQ ID NO: 884 - DNA, 453 bp, Homo sapiens
attcggcatgagggagctgagtagtctccatgggcagctcaaggaggccagggcggagaactcacagctcacagagaggatccgttccatcgaagcccttctggaagcaggccaggcccaagacacccaggccagccacgctgaggccaaccagcagcagactcgtctcaaggagctggagtcccaggtgtcgtgtctggagaaggaaaccagtgagctcaaggaggctatggaacaacagaaggggaagaacaatgacctccgggaaaagaactggaaggccatggaggcactggccttagctgagcgggcctgtgaggagaagctgcgttccctaacccaggccaaggaggagtcagaaaagcagctgcacctggctgaggccagaccaaggagacctgctggccttgcttccggggctctctatctcagcacaccagaactatgccgagt

SEQ ID NO: 885 - DNA, 503 bp, Homo sapiens
ggctcactgccctggcagccgacccagttcaccttctcagtaaggacagcatcctccttcctgctgtccagagcagctttgaagaaactgtaggggatcctcttcttctgctgcttctgaagccagtcgtttatggaatgcaagaagttctggaccaaaggctgcccagggaagtacttggccaatactgccacaaactttttcagggccaccaggcgctgtccctccagcactgagaacttccccacttctacacgcaagatgtagtggagtgcggactccaggtcggccatgtagatcttggagcggtctgcaaacttccacactgtgggtgctatcttatcagcagtgactggggtggctgtggttgggggagcatccctggtcagtccaggtagcccccgaagataggatgtatagaaagacctggactccaccagcacaggcactcgggagacagagccattccgaagcagcaggtaacaagatgggaagtcagtgac

SEQ ID NO: 886 - DNA, 520 bp, Homo sapiens
tgccccttcacgagctgccaccaagcaggctggtagatttcttggcccaccacctccgtctgggaagttttcctgaaggaaagcagaattctgaatttcctgtcatactttttagacattcacatcagacttacagagcacctggccacattctaggtttgtgttatttctcagctatggatatgatcaaatgagaacactgcttaactaatgggatagtgctatggtcacggatggcttctttagtaataagtgcactcactggttacatttggatggcttatgtaaccacaaacatcatctttcttgtctcacttgagtatttcagtgtatgtgccatatacacagaagcagactgtccatgaacattaggagaaaaatagtttatgtaacaacttcactgtaattagttgttgtgttttttaaaaagccaaatatgtcactttgtgttcgacaatgagccaaatttttagatgtttcagttagagaaatgtttgatttttttgcatattaaaaagag

SEQ ID NO: 887 - DNA, 545 bp, Homo sapiens
cattttttctccgggatgggacgaggcacggcattgacacgacaagggaagttgggctgacccgacagatttcgacccagtattgtaccaacgagatttagaggaaggataacaaagaaacagatgcaacaaacggccaccattgttccaaaaggaatggctctagaggcatggtaataaatggctataaagttgatgaagaatgcagtgccacacaccatagctgggataaggaatgccccgataaacatctgctttatccatctccttcctccttgtctagcatacagacttcctccaaagtacccgttcactggcgatgtagcagcatagacaaatatggctgtgctgagcattgaccccctctctgtatataagtcctctatcatggcaacaataataacaatgagagacacagcaaatatctgacatccagagccaatgagggaggagaagatcagagggtgacttgacggtctgaacacatctccatgcacctgcttccagccatactcgtctcctaggtctctgtccatgtcatcatt

SEQ ID NO: 888 - DNA, 526 bp, Homo sapiens
cacatgcacagtggaccatttaccataatccacccccacacccaagaccagccctgtctaaagttatgtgcaactcaacctgcattcctctacaagtcctgcatccacttcactttggctgatttgaggctctgggtgagtcctgagggccgaaaagaagcagggtccccggggctacatgtagatacctcaccaaggctggaggctggtctgttgtaagatgtaaagaaagacagctgagtctgattctaacttagccagaggacaccttgacgaatctgttatctctatctgcaggtaagctagccagcctgtctccttgaattgttccctttgggaaatctaattcacagtattgatctccttttttgccttgtactgaatgacacattacctccacgctctcccggactaactggtccacagggccacagggttgcttgctctctcttgcaggaatggggagtcgacagggatgagggtccaaggaatgagcatgaatgacaagaaaacaaggggaacatta

SEQ ID NO: 889 - DNA, 495 bp, Homo sapiens
  misc_feature 105: n = A,T,C or G
tccaggggactgtacctatttcctgagctggctgaagcttccggacatgcctcctgccccttactaactggctcagctgactcgggacagcctggcctctgccangagaggacactgggccatcactctgtgaacacttgtgtgcccggctggcttctaacacccaccgccattggaatttgagctgtcagctctgggcgccagattggctctgatgctaatttatatgacacaacatctctgtggtttatgttttatttttctttcttactgtcattgttagtgttgtcaagagttttccccctccccgtaacgtttttgtcattatgtctttgacgctttaaatttcagagaagagtatattgcctaatgggaccaacataaagtagttatcaacaactttattcagctctactaaaaaacaaaaggaactaaattattgaaaaggtttaagaggtcattatttccgtgttaaaatctaaaggctgtgagatg

SEQ ID NO: 890 - DNA, 589 bp, Homo sapiens
ttcggcacaaggagagggattatacagcagaactctggcaggcagcatcaccacacctcctctgcttatcgtattttatcagcagcattccaccattgaccctatgtggaatgtccgccatcttggttccagtgctggaaaacggtactcaccccagtttgtaaaagctgccaagttacttcactggaatggtcacttcaagccttggggaagaactgcttcatatgctgatgtttgggaaaagtggtatattccagacccaacaggaaaattcagtttaatccgaagacatatggatacctcaaacataaagtgaactacaatttaagctaattgcgtcactcaggaaactctggaagacacactatgtgggaaggtaacagttgtagggcttgagtttctctataccaaccacagaaaacacttcagctgggtagaagtcatagatatccagatgactaccacggctccatctgccttaccaaatgtttgctttactatactgctgacttgaaggacagagaactccagcatttaactgcatctagctgctgtaggtaggaactgctgtttggttttagttttgtac

SEQ ID NO: 891 - DNA, 490 bp, Homo sapiens
ataagtgtttttcagagtatggcccatgggcaaccattcagttcctggaatgcttattaagaatacagattccaaggccaattcgagtccatccatgtcacaactcaggtgggcttcagagtgtccattccccagacaccacagacatggcacactgacaggtgacaagcactagaatgggggtaggggaaaggtttgctgggtgtttattatgggctcagagccgagccatgcacattttcactgtcactgagaccggcgtctgctggttcttctgtactcttgagtgttcgctcaccaactctccactcactaacaactacaaaccaagtccgggttgtcggctgacctctcggctcccgggtgatgactctgaaacctgtacaatcatctttggctcatggcagagcataaccgcgcccatggtgaagcttgcctgccaaagcccttgccttcctgacggtcaccactgctcatctcagatgccgcg

SEQ ID NO: 892 - DNA, 431 bp, Homo sapiens
cagttccctacttgacttatggttccctacgtaacttacagttctcattagccctaaatcactggagagatccatctttaccatttcagtggtagcattttgagaggtgtatagtgaggcgttactcaaatataccccatctaacctgacatttaccacctccctctctgtccttgtttctcaaaacctttttttctcctcctcaggctttttggtgtcatcatgtaataattgtaggagttctcagctcattttgatctattaccttttcaatagaggctgaatcagccaatcccacccgccaagcactgaactgggcgggatggacgatcagttgctgaaggctgcaagcagtagcaatgggaaacagtagatgacctccattctctcaggtggctgcagacagagcagagcagagatctccctctgaa

SEQ ID NO: 893 - DNA, 313 bp, Homo sapiens
agcagcaggagcggctggaggagagagagcaggacattgaggaccagctgtacaagctcgagtcagacatgcgcctggtggaggagaaagtgagccagctgaaggaggaggtgcggctgcagtacgaaaagctgcaccagctgctggatgaagacttgcggcagacagtggaggtcctggacaaggcgcaacgaagttcgtgcagcgagaacgcggcgcaggccgtgcaccgttggggagcgcatgcaggaggccaagaagctgctgggctccctgcagcgtctcttcgacaagacagaggacgtcggcttca

SEQ ID NO: 894 - DNA, 533 bp, Homo sapiens
aattcggatccatggggggtctcaccgggcgctgtctccttgacagatttcggtcgaaatgtcctacaccccgggccagcctgtcaccgccgtagtgcaaagagttgaaattcataagttgcgtcaaggtgagaacttaatcttgggcttcagtattggaggtgggatcgaccaggacccgtctcagaatcccttctcggaagataaaacagacaagggcatttacgtcacacgagtatcagagggaggtcctgctgaaattgctgggctgcagattggagacaagatcatgcaggtgaatggctgggacatgaccatggtcactcacgaccaggctcggaagcggctcaccaagcgctcggaggaggtggtccgcctgctggtgactcggcagtctctacaaaaggctgtacagcagtccatgctgtcttagcagtcagccaccgtctagacttgggcccactgacctttttgtacagtgagaacacatccatgctctgtctgtatctagttctggcttctgctgtgtgctg

SEQ ID NO: 895 - DNA, 605 bp, Homo sapiens
gcctagagagggctgaagttggagtgccagcggagttcggcatttggactagggaagctggcgctggaggcctggccattgctgttgaaggccccagcaaggctgagatctctttcgaggaccgaaaggatggctcctgtggtgtggcctacgtagttcaggagccaggtgactatgaggtctcagtcaagttcaacgaggagcacatacctgatagccccttcgtggtgcctgtggttctccgtctggtgacgcccgccgccttactgtttctagtcttcaggagtcagggttaaaggtcaaccagccagcatcttttgcagtcagtctgaatggagccaagggggcaattgatgccaaggtgcacagcccctcaggagctctggaggagtgctatgtcacagagattgaccaagataagtatgctgtgcgtttcatcccacgagagaatggcatctacttgattgatgtcaagttcaatggtactcacattcctggaagtcccttcaagatccgagttggggagcctgggcatggaggggaccaggcttagtgtccgctatggagcagcctggaatgtggtgtacagggagcctagcagagtt

SEQ ID NO: 896 - DNA, 383 bp, Homo sapiens
gcagaggctgcgtttgtcatctgtgggaccctgtacgttgtctataacacccgcccaaccagtagggctcgtattcagtgttccttcgatgccagtggtactctcgcccctgaaaggcagcactctcctattttccacgccgatatggtgcccatgccagccttcgctataacccccgtgagcgccacgtgtatgcctgggatgatggctaccagattgtctacaaattggagatgaagaagaaggaggaggaagtttaagcagctagccttgtgctcttgattcttatgcccagacatttatattcctgtgagctctcctgcagttcatccttcaaaacgaaggccagtggtggtagctcatataccctaatttctaaagga

SEQ ID NO: 897 - DNA, 356 bp, Homo sapiens
aaagtgaggggcggtgatgacatcagcgtgctctgcactgtcctcggggagcctgatgtggaggttgaattcaggtggctctttcctgggcagaaggacgaaaggcctgtgaccatccaggacacctggagactgattcacagaggactgggacacaccacaagaatctcccagagtgtcattatcgtggaagactttgagaccattgatgcgggctactacatatgcacagctcagaatctccgaggacagaccacagtagcgaccactgttgagttttcctgatttggaaagtgaagagtagtggaccaatgggatgcccatctgcacacacagcttccaggtgctttatagga

SEQ ID NO: 898 - DNA, 565 bp, Homo sapiens
agcagcctcttgctcagacaggcatgccgccgtccttctcaaagcccaacactgaaggggctccaggagctcccattggaaacaccatccagcacgtgcaggctctgcaacagaaaagattactaagaaacctattccggagagcacctcatcctaaagacgacatttgaggaccttatccagcgctgcctctcctccgctacagacccccaaaccaagaggaagctggacgacgccagcaagcgcctggagttcctctacgacaagcttagggaacagacactctccccgaccatcatcaacggtctccacagcatcgccaggagcattgagacgaggaactactcggaagggttgagcgtccacactcacatcggtcagcacagcaacttcagtgaggactcggccttcatgcccgtcctcaaggttgtcctcagtcagggcagcaagcttgggtgtctgaggaatgcagcactgtcgctgacattggcaacttttccaaaggaagccatgttaagactgggaccagccctcgttaagatggttccctgccactggtcaacag

SEQ ID NO: 899 - DNA, 444 bp, Homo sapiens
ttaacgctaagaaaacttttaattgtgcatatgtactaggtagcatctcagatacaaatggctggccatcaaccttgctatcaaaatatgtagtgtgggaatatgtttttagaaggacagaaaagatgccactaggggcccataaatctgccttcttatgagtataggtgcaaatttacatgtgcaatgatgcaggtttgtttttattagacagtctcctgtagtaacagagcaagttggccttgaactcctgatgtagccaagggtggtcttgaactcctcattctacttcctccacctcccgagtgctagaattacaggcaccaggcccggccactcacgcaaacctttattatgtggatgggatcatttttttcccctttcagtgaatccctctggagctgtggggcagaaagcgccctgatgtccagtgtaccatggtaa

SEQ ID NO: 900 - DNA, 449 bp, Homo sapiens
agcatgttgaaatgcacctgcggtctgagcatccccctctttgtggacgggaccacctgagctttcgttcttactatttccctgttaagaatgtgattgatggagacctttgtgagcagttcaactccatggaacccaacaagcagaagaacgtctctgaggagctggaccgaaccccacctgaagtgtccaagaagcttgaggacattaggacccgctatgccttctgaacccgtctttatctggggccttgcagagagcccctcttttgttcccattgccagtgtctgcttttgcacacagcagaagtgatgtggtatttaagactgcattgttaaagccagtagctctgcaccctcaactctcccctttgaatgactggttccctacagttgacactgaagtctgctccttgaacatagtgtgtggccctgagcttcggtgtggaa

SEQ ID NO: 901 - DNA, 220 bp, Homo sapiens
cgcttagtgctgctccggtacagggtcgcgctcgcgtctgtccttaaggctctcctcggtgtccacggcaccctctttccttgctttgcagcgatcctactgccagaaattcgccatgtctattctcaggatccacgccagagagatctttgactcccgtgggaatcccactgttgaggtcgatctgtacaccgcaaaaggtctcttccgagctgcggtg

SEQ ID NO: 902 - DNA, 726 bp, Homo sapiens
  misc_feature 53, 585, 671, 687, 712: n = A,T,C or G
tttaaactaatataacaatttaagcaaagcctatcggcttctcaggaggaaancgcattgcttaaatatgggcaagataagactttgtgtttctctatgtggcaacaagacagtagaggcatcccctagaacctctgagagaaggagcagtcgtggtctggggtaccagggtggggccgactgagggtctttccacagccccctgccagtgctccaggctgagcccccataacaggacgaactgcggcttccctggaatcaccagtgaccagtgttttgacaatggatgctgtttcgactccagtgtcactggggtcccctggtgtttccaccccctcccaaagcaaggtaatcttccagggaatcttcctgggccagcagctggcaacccaggacccagcttcacaggcggagcccagagcaggggccggaggaggcccagttgctagtctagggttagcctgggtgggttagtctcgagctagccccggttggttagtctggggctagcccaggttggttagtctagagctagcccaggttggttagtctggggctagcccaggttggttagtctggggctancaggttggttagtctagggctagtgtaggctagttagtctaaggctagcccaggttgggttagttttgagctacgcaggttgggtnagctggggctagtacnaggttggtaagctggagctatggtnagtctggggctacc

SEQ ID NO: 903 - DNA, 1329 bp, Homo sapiens
  misc_feature 700: n = A,T,C or G
tctagaggtaacccaggtcagccaacagtgagatgaaaatttcccacctaccctgtttctacactgttagttctttcaacagacatgtgtgtgtggagccatcagttttactttagttgagaaaaaaatatatatatatatagtaggtctcctctagtttttgaagtgtgacttctgaagaagcttccatggggaaatgaaggtatttaataggacagcagtaacataagggctgacagccctcaaatgttagggaaggaagtgaagccttctagggttctttgggagtgagttttatgttagtgcacgggatcaggacccaagttgtaacgccgacgagtgctcaaaggaaggttgtgtgtgtgtcgtgcacctgtgtgcgtggaaccaggcacgtcctctggagaaggaggattcatccccaagattgttgctgggaggcttgctgggccccgcagggaaaccaggcagatggtggattgttcacgagcgcccactgaatggcagtgtctttgggaatcaataccatgtccaaacgctttccatcttacccaggtgcccacaaaccttttctcatcttggcccgggggaccaaccccatttactgagaacactgagtcccgagaggcaaaatgatttccccaaaggcgggggactcccagagctcctgactgtgaccaccccacatgggccccaactncgcggaggacaggccagccaagcgtcgctggggccgacacttccacagtccccgggggaggcggtcccaggggccgacacttccacagtccccgggggaggccgtcccgggggatgctgccccaggcagcacctcatgatccacggaggctgcaaatcagcgctgctctcagaggaggaaggggtggagctttccagggcacagcaggcctgactgggtctcggtgctgtgcctgtcccatggcagagtcggatcagtgcgtcatggaggtctcagaccgaagaaactgtggctacccgggcatcagccccgaggaatgcgcctctcggaagtgctgcttctccaacttcatctttgaagtgccctggtgcttcttcccgaagtctgtggaaggtaacgtcgctgtgggactctctgtctggttcccggacaccatgattcctcctccgtccgtagaggtggggtgcagggaggggagctgcctcgctgcctcagtgccatcgagccagggcccctgcctcctatgggattctgaaggcaattccagaatgttcttggcaaagacagcgtctattcaataagtttatagcctccagcattgccactgcgtcatctgtgatggttctaga

SEQ ID NO: 904 - DNA, 1057 bp, Homo sapiens
  misc_feature 118, 881, 923, 941, 956, 972, 990, 1014: n = A,T,C or G
ggaggtccgccggcaagagtgaacggtccacttttcccacccgcttagtgaatagtgtgtccctgaactcggagtgtgcgaggtaaaaaaaagaccagcaagatccaagaaaatgggnaaagagctactggcccttgaaggatgccttttcttttccttttgttaggatatcaaagcactccaaagagcgaaatatttcatgttcaggattttccgagtgattttttttattgtagcctaaaggtccacctagaaaatgttcacttgtctggggagaatgcgccccacagaggaaactctggcctggggtgggaagatttggtccctttacacccctccccgggaaaggagctccttcttcagtaggaagctcctgggcaaagtgatgcacgcccaccccagcttcgcagcctaggcactcccatttctggggttcccttaccaaccatcttgcatttaaacttctagactgccattactaagagaggctggttccagaggatgcatctggctcaccgggtgttccgaaaccaaagaagaaacttcgccttatcagcttcatatttcatgaaatcctgggttttcttaaccatcttttcctcattttcaatggtttaacatataatttctttaaataaaacccttaaaatctgctaaatttctttttggtttcattaacacagaggtggtaatggtggtgtgcgtgtgtacacatgtatgggtgtgtgtacccatgtatgggtgtgtgtacccatgtatgggtgtgtgtatatgtgcgaatgtgcatatgtgtgagtgtatatgcagggtttttttgtgtgtgttttgagacagagtcttgctctgtcacccaggctagagtgcaatggtgcaatcttggntcactgcaacctcctcctcccaggttcaagctatcctcctgnctcagcctcccgagtagntgggattacaggtgnccaccatcacactggntaattttggggttttagnagagatggggtttcacatgtgggncaggctggtctcgactcctgacatcaagtggcctcccaagtgg

SEQ ID NO: 905 - DNA, 631 bp, Homo sapiens
acgcccatccgctgagtaaggcggtggcaggacctgcagtggatggacagaccctcagacggatggtgggccacagcgccccgacggtgcccggcccctcctgctggctcctgcactctcctgcacagttctcccctttgcagtggtccacttcctttctccatctgttttggggcctcattacctgtcattctcctttcccctgctccccaggtgctggcctggtttgaggaaggtgaagagaccatcactgcctttgttgaaccctttgtcatcctcttgatcctcattgccaatgccatcgtgggggtttggcaggttagcgttgacccttccttaccccttcatgtcccaacagtgaagaagaggccaaccctccctccagtctcctcctcctccatcacctcccccatacttgcctcttcctctggtcctatcccctggtctggaatgggatggagtgtggggaagaggtgggagactgtgacccactgtcacttcctggctatgtgaccctgagcaagttccttcatccctctgagcctcagtttcttcatccataaaatggggctagcaatccagtgtgaaatcgactaagatgatgcatgttcctggcacacagtaggaattc

SEQ ID NO: 906 - DNA, 555 bp, Homo sapiens
ttttttttttgtactttcgtagagacggacggggtttcaccatgttgctccaggctggtctcgaactcctgacttcaagtgatcccgccctgcctcggcctcccagagtgctgggattacagcgtgagtcaccacgcccggcctgattttctttgattcttctttgttccctccccggggccctctcacctgttttcacctgtaggtgacagtttcctcaacatacacacacccctgcctgtgtggggttttgttgcctcccccgtgccaggagccacaactccataactgcctcctgtgtataaccctgcctcctccaccctgtctcctcaggagcggaacgcagagaacgccatcgaggccctgaaggagtatgagccagagatggggaaggtctaccgggctgaccgcaagtcagtgcaaaggatcaaggctcgggacatcgtccctggggacatcgtggaggtggctggtgagtgacagggacggctggtccagatgggaggccttggggctgaggcctaggagatgccgggggctggtcaggctcggatc

SEQ ID NO: 907 - DNA, 919 bp, Homo sapiens
cacctgcccatcccttctcagggctcacagccagtgggaagagatgtggggagttcaagaccagcctgagcaacagagcgagactccatctcgccgtggacacgggggcagaagggatgggtgtcacgatgaggggttgccagcttcaggagctcaagccaagggcctcatgcaagccctgggagcctccctgagacctgaaggatggatgaggagaacgagtcagacacagattgggtttttctttggaaggaagaaaattccattcccaagtgacctccctcttccctactctctccacagtgggggacaaagtccctgcagacatccgaatcctcgccatcaaatccaccacgctgcgggttgaccagtccatcctgacaggtctgctggcctgggtgggaagatgcatgggggtgggatgtggggaggaagaggcaacaagggggaggtgagtggaaagacagagaaccctcactgtctgagcaacataaagagaccctgtctctacaaaaaaattttaaaaactagctgagcatgttgttgagtgcctgtagtcctgactactcaggatgctgaggcaggaggatcgcctgggtacaggaggtcaaggcagcagtgagctgtgatcacaccactgcactccatcctgggccaccctgtctctgtcaaaataaaaacaaaaggctgtgcgaggtggctcatgcctgtaatcccagcactttgggaggccgaggtgggtggatcacctgaggtcaggagttagagaccagcctggccaacatggtgaaaccccatctctaccaaaaaatacaaaaaacacaaaaattagccaggcgtggtggcaggcacctgtagtcccagctactcaggaggctgatacagtagaactgcatgaacccaggaggctgaggctgca

SEQ ID NO: 908 - DNA, 2289 bp, Homo sapiens
aaaaaaaaggagcaatggacttcctagctgccttcagtggcttcttccagagtccagacatccccaggatggctacttggtcttaccaggagctgttcgctgagcagggagagaggttaggcacggaagcctgggagaaggacatgatgtcatccgaaacccttggccccttctccacaggcgagtctgtatctgtcatcaaacacacggagcccgttcctgacccccgagctgtcaaccaggacaagaagaacatgcttttctcggtgagcaatccgggaccagccatcacacactcagtcaagccaggtgcccgggttggagaaacatggcgtgtgagaagagatggcgtggggagatgcggcatgagggtcacctcttgcctgattccctgcctcctctttccttcccagggcaccaacattgcagccggcaaggccttgggcatcgtggccaccaccggtgtgggcaccgagattgggaagatccgagaccaaatggctgccacagaacaggacaagacccccttgcagcagaagctggatgagtttggggagcagctctccaaggtcatctccctcatctgtgtggctgtctggcttatcaacattggccacttcaacgaccccgtccatgggggctcctggttccgcggggccatctactactttaagattgccgtggccttggctgtggctgccatccccgaaggtatgaaagcctttcttttctcctcccatttgctaatcccatctgcaaagaccccttttcttttcttttcttttcttttttcttttttgttttgagatgagtcttgctctgtcacccaggctggagtgcagtggcgtgatctcggctcactgcaagctcgcctcgcggggttcacgccattctcctgcctcagcctccctagcagctgggactacaggtgcacgccgccatgcctggctaatttttttatatttttagtagatacggggtttcaccgtgttagccaggatggtctcgatctcctgacctcctgatctgcccgccttggcctcccaaagtgctgggattacaggcgtgagccaccgcacccggccttgctcagtgcaacctctgcctcctgggttcaagtgattcttctgcctctgcctcccaagtagctgggattacaggtgcacgccaccatgcctggctaatttttgtgtttttgtaatctcgaactcctggattcaaacaatcctcttgtcccagcctcctgggtaactggtgccacaggcaatcaccaccacacccagctaatttttaaatattttcagaggagtctcactgtgttttccaggctggtctcaaactcctggcctcaagtgatcctcccgcctcagcctccaaaagtgctaggattataggtgtgcaccaacgtgccagctgggggctactatttagccccttgcaggttccctcacaccctccccttggcaggttccctcacaccctccctccctccccacaggtcttcctgcagtcatcaccacctgcctggccctgggtacccgtcggatggcaaagaagaatgccattgtaagaagcttgccctccgtagagaccctgggctgcacctctgtcatctgttccgacaagacaggcaccctcaccaccaaccagatgtctgtctgcaaggtcaggagcagtgtgggcagcgcgctcagtcagaaggctgcctgtgggggttaaatgggcctccaaagatagaggtctcccttcatcactgctggcttctcatctgggcctgcaaaatgctcaaagggcagtagaacgccatcctgtctgccatgaacgggatcagagaggacccttgtgccccagccagacagctcactctgaccaccatccacgcaccaggcactgccacacatcgtctctcatccctcacaatagcccattcagaggatggtctcattatcttcattttttttaattaaaaaaaattattattatttttgagacagagtctcactctgtcgcccaggctggagtgcagtggtgtgatcttggctcactgcaacctctgcctcccgggttcaagcgattcatctgcctcagcctccctagtagctgggactacaggtgcctgccaccacgcctggctaatttttttgcatttgtaatagagacagggttcgccatgttggccaggctggtcttgaactcctggcctcaagtgatgtgcccctgttcgcttcccaaagtgctgggatgataggtgtgagccacggcacccagcctaacttccttttttagagg

SEQ ID NO: 909 - DNA, 1186 bp, Homo sapiens
tgtttaaggctgttgatagagaatgattgcaacagcttggtgggaagtgggtagggtatacgggggggatgaggaggggtgagtaggagggaaatggtgggaaggtaggtgttggcagtgcaggcctcccttgatgcaggtgcccaccttgggatgggaagaggtggacatctgtgtgcctgcccttctcccctgcagatgtttatcattgacaaggtggatggggacatctgcctcctgaatgagttctccatcaccggctccacttacgctccagagggagaggtgtaagtcacccaggcatcttctccccagctcctcacgccccttcccacaccccctttctccctggggccctccatgtgagttttgctctcctttcactctcctcttcctccccgaccttgttctctctcctgatatccgagttggctctccccactgtccttccttaccctctgctgcctgctcttcctgtgccctctctgcatctcattccctgttcttctccactgtctctgtcccttcctcccctgaccctgctgccagcttgaagaatgataagccagtccggccagggcagtatgacgggctggtggagctggccaccatctgtgccctctgcaatgactcctccttggacttcaacgaggtaacctctccttccccttccagttggctcagagtctggcctcctccgaaggccaggaggaaagggttggaggaaggggacccagtacacccagccctctgccagggtgcaagggaggcagtggtttgcttccttcttacgctaggtggaaggacggtatgacaggtaggagcctggggcaccgacttcctcttcctcctctgcccatctcaggccaaaggtgtctatgagaaggtcggcgaggccaccgagacagcactcaccaccctggtggagaagatgaatgtgttcaacacggatgtgagaagcctctcgaaggtggagagagccaacgcctgcaactcggtgagcctgcggacgccctgccacagggccgtctccactctatgctgcatagactagaggaaggcagaggccctggttgggcagagcctagtgcctgtgctgggaccccacccaggcagcagacagccccctgcagcttctccacaggctgatgtgggtgggtaccattgtaatggggatgaatggcgg

SEQ ID NO: 910 - DNA, 772 bp, Homo sapiens
agacttatgttagtctcagccttagcttgggtctgctctgacctccagattcttttgaccattttaagaggactggtctcccctccctgtctcctctcccaggtgatccgccagctaatgaagaaggaattcaccctggagttctcccgagacagaaagtccatgtctgtctattgctccccagccaaatcttcccgggctgctgtgggcaacaagatgtttgtcaaggtcagaaatcggaatgtgcctcagccccctcttcttcctactcctagccacctgtcactgccctggaaggaaagtggtggtctctgaatgctgttctggtctcctagggtgcccctgagggcgtcatcgaccgctgtaactatgtgcgagttggcaccacccgggtgccactgacggggccggtgaaggaaaagatcatggcggtgatcaaggagtggggcactggccgggacaccctgcgctgcttggccctggccacccgggacacccccccgaagcgagaggaaatggtcctggatgactctgccaggttcctggagtatgaggtaagcagctgggagcctcccactgtcgtgagctggtgaagggccgggtcccagccatccactcacagctccaccacccggatcatttcctacctcgtcagtcaaggggtgcagtgactcacacctgtaatctcagcactttgggaagctgagatgggaaaagcgcttgagcccaggagttcaagaccagcctgggcaatgaagtgagaaccccatct

SEQ ID NO: 911 - DNA, 1035 bp, Homo sapiens
aaaaattagctggacatgttggtgcatgcctgtagtcccagctacttgggagggtgaggtaggaggatcgcttgagcctggtagattgaggctgcagtgagctatgatcgcaccgttgtaccactgcactccagcctgggtgacagagcaataccctgtctcaaaaaaaaaaagatacgatctgacccatgatgggcctggcaccataacccgtgcaggtgttagatgaatgagatgtttcctgcctctgagcttccaaggccccactgaggtctgacaccaggccctgaggcgcaagcccagggttcaggcttcccacccctccccaccacttcctgacctttcaccccatccccaccccccaccagcttcctccaggggagttttccagatccccacctgacctgtggctctctgctgtatctccccagacggacctgacattcgtgggtgtagtgggcatgctggaccctccgcgcaaggaggtcacgggctccatccagctgtgccgtgacgccgggatccgggtgatcatgatcactggggacaacaagggcacagccattgccatctgccggcgaattggcatctttggggagaacgaggaggtggccgatcgcgcctacacgggccgagagttcgacgacctgcccctggctgaacagcgggaagcctgccgacgtgcctgctgcttcgcccgtgtggagccctcgcacaagtccaagattgtggagtacctgcagtcctacgatgagatcacagccatggtgagagggccaggcagctgcagccttagtgtccacggagatgaccagatgactgtgctggggagagtggggcccagggacccagagggcttaagatgcaagaaggggtggggattcagaccccaaggaagagtctgaaggaggatttgtgggctgggctggcactttgggaggctgaggtgggcggatcacttgagcaggattcgagaccagcctggcaacatagcaagacctcatctctactcaaacaaacttaaaataaatttag

SEQ ID NO: 912 - DNA, 3040 bp, Homo sapiens
tgtgccgttctttgttctaaacctgagttttttggccaagtgttggtgggcacatgcctgtaagttcccaaacactttgggaggctgaggcaggaggattgcttgagcccaggagttcaagaccagcctgggcaacagagtgagacctcatccctaaaataaaaccttttttaaaaaggagggatgtgtgaaggtgccctaagcccaccttctcctcctccctcagacaggtgatggcgtcaatgacgcccctgccctgaagaaggctgagattggcattgccatgggatctggcactgccgtggccaagactgcctctgagatggtgctggctgacgacaacttctccaccatcgtagctgctgtggaggagggccgcgccatctacaacaacatgaagcagttcatccgctacctcatttcctccaacgtgggcgaggtggtctggtgagcagctgggtgggcgtccaggaggaagccggggttagggtggggtggctgcaggtctgggaggcaggacagaggcgtgaccacctccttccccaccagtatcttcctgaccgctgccctggggctgcctgaggccctgatcccggtgcagctgctatgggtgaacttggtgaccgacgggctcccagccacagccctgggcttcaacccaccagacctggacatcatggaccgccccccccggagccccaaggagcccctcatcagtggctggctcttcttccgctacatggcaatcgggggtgagctggaggggttcctcgatcctccccaccccttgggactaaccccctctctgggacaccagctcccccatgcaggtgctgagagggtcttcttccttggccagcctgtccatggccacatgaggccctcaaccctcgatgccccctatctccccagccctgacccccgactcccctctctccaccacaggctatgtgggtgcagccaccgtgggagcagctgcctggtggttcctgtacgctgaggatgggcctcatgtcaactacagccagctggtagggggaggccacaaaggaggggaccaggaggggggggggatgcaggagggtaccaggagggtggcatggaggtggccctggacctcagtctcccgtaccttccctgcagactcacttcatgcagtgcaccgaggacaacacccactttgagggcatagactgtgaggtcttcgaggcccccgagcccatgaccatggccctgtccgtgctggtgaccatcgagatgtgcaatgcactgaacaggtgggggccccccagctacacccaccaccctcccctgaggccactgcccacatcctccactgtgccgcccacctccttctcctcactgttccttctccctccccttcccctctgcagcctgtccgagaaccagtccctgctgcggatgccaccctgggtgaacatctggctgctgggctccatctgcctctccatgtccctgcacttcctcatcctctatgttgaccccctgccggtgaggtttcttccgcccagggccgcccaccccagcactggggagcccacgggcgcccatgaccactcccaccaggggcgccgatgtgggaggctggtgggagtgggctgggcagtgctggtctctggctccctccccaccccctcctgagagggcgcttgtcccctgccccagatgatcttcaagctccgggccctggacctcacccagtggctcatggtcctcaagatctcactgccagtcattgggctcgacgaaatcctcaagttcgttgctcggaactacctagagggtaaggagtgccctctctgtcccaagccctggccccaccacagccccttccccatgacgtccgtcccccgtccccgccccgtactttgcaggtggtaagtttctcagccctggcaggacctgtgtccgccccgttccccctgcgcctgcaggccacatctccggggcagccccactgcctcctcagcccccacagcccctatagcccccatgccacctccctgccttgataacagtgcctcttgtcctctctggccataggataactgttccccctcctccatctctgagcccgtgtcacaggtatcacccccttcttgccctcagcccagctgctgtgcccctgccacccgcgccccctcagcccctttcgcgtcgcatccaaggtcacttgtgctcgcagctccacctggagccgttgccactgctgctgctgctcttccagtcagggtgggccgctggctcccactcgggcgtcagtttggctcccaggccctgggcagtgccagcctctgggcccgtctgctgcgctgcgttgcgctggctgtgtgctgggctgcagtgggggggggcgggtgtctggggacgcaggtgagtaggggagaaactggcagggtggtaagcttctgagcctccaggtaagtgcgtgcctgggagatgcacctgggagggacctcgctgccctcctgccgcctgcctcatcccttctcttttcccctttccagatccagaagatgaaagaaggaagtgagcatccttttgctctgtcctccccaccccgatagtgacacatcttcaggcagagctgtggcacagacccccgtcctgtcccccacacccgtgtcatgtgtctgtttataaacatgtccccttccctttccttccccctcggccacccgcctccctctcaaccttgtaaattccccttcccaaccccgaggggcttgcagggacaaggcgaccgactgcgctgagctgcttatttattgaaaataaacgacggaaaagtctggccttgcctctgtgcaagcttggaggcctgggtcgccgctgtggacaagcgtcttagtgtcatgcagaccagaaggcagctgctgtcccagggccggggcacctcactgcctctgatggggactccagcccccatggctccgctgttgccctggggcaggggacgggctggggggcaggggagggctggagcccaggaggcagcacagcagccagaaagcaggcc

SEQ ID NO: 913 - DNA, 9100 bp, Homo sapiens
  misc_feature 3286, 3300, 3301: n = A,T,C or G
ctgcagttagagctaaagcactggcctggtctctgtcactgtgactcatcctcttctaagaatggctctattttcttctacaatacttaattcaatgttaagcattgttggcttgccgaattgggcaaaaactgaatgtctaagatgagccagttggtatttcagtttagaactaggaaagcgcagagtttggggaaactttccagaggagagccacagctcaaacccaaggtaatgctagagatccctgaacatttgtgcactctgatctctggctaccttacagagtgaggtaacttactttcttcttccttattccttagggcaagaatatcacggcatgggcatgagtagcttgaaactgctgaagtatgtcctgtttttcttcaacttgctcttttgggtaagtgtatctcttctgagcacggtttagctcacctttacccagctaagctctcctcattcctctactgaagaggctggtgtggggtaaaatgcatgcgtgtttgggtcatgtccagcacaaccatcctagaaacaaaagagtaataatttttcccctcttcctgccacagaataaacctgcaaaattgaaaggtaccagtgcagttattaatggaggtgctgtttctctctgagggctttagtttactactactcatagctaacatatataggtgagaaacctgagactgtgctctggatattgagtgcctctgtttttcttgtctttttttctagattccttgaaacaataagtgattgaaaggaaagtcaccctttccagggaggtttcactgtataaaattcagcaattgaatttcagatataggatgggttggtacttgtgtatatgagaagattattataagtttggcttctctagttttctgcctagcaagatgagcttcctcaagcagggcatcttctctacatggtcatggtttctacagagaaagccatgtgtgagcgactgaaagataaggaaaaagaagttagacctatatatggtgaagatattgtgtggctcacagaagtgactttccttggtatctggagatgggtaggaagagttgtgagtaggtctccacatgagaaagctgagattgcctctccaatgtaagcatggaaaagtttggtaaagaaattgttcatgagactcttgattgagccagttaaaaataaagtgattctgatctcaaggaagtgagaatatgaggagatacccaagaaccacattttgcttcaggatgttgtgggattcttcctttcagatctgtggctgctgcattttgggctttgggatctacctgctgatccacaacaacttcggagtgctcttccataacctcccctccctcacgctgggcaatgtgtttgtcatcgtgggctctattatcatggtagttgccttcctgggctgcatgggctctatcaaggaaaacaagtgtctgcttatgtcggtgagtccttacagcagatgtggtgccccaagtcggggagatggtgcctaaatcccaggcaagatgtttcttggtagatcacttataggcacagaaagatcataggaaaatgagattggtacctcagatcagccaagtctgcccagaccaatagtatattatgtatgactagggtcccatggacaggtgaaagagggcattgctatcccccttgtagccatttttatattgctaataatgacttttgtcattattgtaattcccctttatagcattttattttttctttatgtctggatgaaatcaggtgtcatccatcttccaaaatcctcctcatgctagctattattatgtactttcagattctgactgagagtcgctaactaatggaaaataatttctaggctctttcctccccaaatgccaaaggatgcttccttaactcatgtctgcacaagatactccgtagagagatccaacttaggtgagggctctggctgcagccattgaggtctaatgtgagagatgctacagccttttgcatgttccctatcaggtactatcctgaggagtaccttaaggcttaggttttgcctgtaagcacagtgcctgtagagcactgagctctacatttctgtagtgttcccagaacagagcttgttgtaacagtgccactctaccaataggcgtgggtttctaatcacattggttcttccttaaatcatttggttaatcttttttccattatggttcaacattttggtggtggttttttgttttgtttttttcttcttgttgttgttttggagatggagtttcactcttgttgcccaggctggagtgcaatggcatgatctcagctcaccacagcctccgcctcccgggttcaagccattctcctgcctcagcctcccgagtagctgggattacagtcatgcgccaccatgtccggctaattctgaatttttagtagagacagggtttctccatattggtcaagctggtctctaactcccgactttaggtgatccacctgcctcggcctcccaaagtgttgggattataggcgtaacgactgcgcccagtctgtatgggtcaactcttaaactggagccaagagaaagaattttttaaaaagtccctcttctcagatagttgtcagactaatggcaaaggatggaagatagcagacatggggtaaggtaaatgttttaagcagtcaaaattaatgttggggtaaaaaaggtgaaggagaaggaataagtgaaaatgttttctgttgtgtgttattagcataaaaggagtaagcatcgaaagctggaaacaaatatgagttagaaccatggctaggacccttctttctaccattgtacagggctcctctcagccactaccagcagtcctccacccagaggtatccctgatcttgtagaaaggaccaggccccaaatgatctagtttaccaaccttttgcttaactgcttcaataggcagatgtcaaaattgcttaacttattcaacaggtggtggtgtgtatgtattatgcatgtagtgctctgataggcacagcaggtaggagagagcaaagaagacagttgatctgccctctagagtctaattgtagaaaaagaacacatattttcacaaaacaaaagaaggcttacaacggcctgaggaggcagaacaggaacaccctgtacgtgtgcaaatgcccctggatgctcccagagctgagtgggagtgggacgagaatggggatcagtgctgtgagaatgtatctgctttgtcccagttcttcatcctgctgctgattatcctccttnctgaggtgaccttnnccatcctcctctttgtatatgaacagaaggtaagttataaagacaacaacttattgtcttaattactgaaagtggggagtatgcagtggagaagttggtacaaagttacagaataagttctataatagagatagacatgaagtggaaggatagaggaaacagagagtaattgtaattggggggaaaaatttgtatgaaagagattgtatctgagtggtatcttgaggggtgcctggaaagagcagtaaaacaagtgtctcttcctctacttgctttcctctgtgtgtttggcaggagagaatgtctgcctcagtgcctaaggatagcccttgctttaattgctccttttcctcccttgtaaagccagagctctagaaggaagcaagcctactaaatacttcttccttcaatgccacctcatgctcagcatgtatgcccatagataaacaccctcccctcacccttagttctgaggagaccatttggaagggaagcgcaagtggaaccactaacctatactggaaattccttattccttgaactcacctgctttttaccatgtctcctctgctggaatgtgcctgcccagctgaatgagtatgtggctaagggtctgaccgacagcatccaccgttaccactcagacaatagcaccaaggcagcgtgggactccatccagtcatttgtgagtacaggtggaatcctcttcagatcagcccagacttcattttcaagcctaaatccttgggggctagttcctttttctggaagtttcagaatctaaggtccacatccctgaatcccagaataatgccttggctatcacaaacatgggagcccagtaattagtctgattagtacaaagttctctacattctctctttcatccttttctaacatgaataggtttattttataagttctgctaggatgtgaagaagacccaaacacagcaaactggattagtttatgtattttccaaaattttactgaaaacagcattgtataacacaagaaattgccattgagttcccgagttgcccaaatcaggcttgttaccatgcccaccaacatcccattcctcatgtgctgtttccacccacaaacgtgtatatgtacagatatacaagctctgcattcctgacatgatgtgttgggagataaagatggagccttgcaccagtataatctatttgtgtctcgaaacagtaccactatgaaagcacgctggcttagtgtggagtagaagaaatggcacaggaattagagcctggagaccagaattgggtagccctggggaagtcacttaacttatttagatctccaattctttatttttttaattcagtttagaaaactttttattacataatttttagaaatatacaaaagagaaaaacagaaaaatgaatctcccaactcctcaatagttaacattttccagtgtcatctcatctaattccccacacttttttcgttagaatatgttaaagcaaatactagacaatatattatttcacccactaaatataaaagaacttctttttaatacacctaaaattttataatttcttaataccactaataaagtctataattaaatttccctaattttctcaaaaaattttaattgacttgttcaaatcaagatcttaacaaggcctatgtgttatatttgaatgataggtctctctatttatcttttaatctataatagtacacctctttgttcttgctctttgtggaaagaaattaggctatttgtcctttagacttctccactctctagatcaggctagttgcttcctcgggtattttggtatcagggagtctctgtctcccataagccccatgaacttaaaagtttgatgtggtttttgttttgtggtaagactgccatagctgtcacttcctgttgcatcgtgtaagcaggtacataatgtctgatggtcctcctttctgtgatcttaagattggttggtgggtccaggggtggtcagcctaatccctccattatgcagtccctgggtgccttattcttgatctgtaaaatgtgactagattaagcacaggggtctctactccacagggatcttatgtgaatgaaatggtataacagattagaaagcactttgttttaaggagcccatagcaatcagaccaattctggacttctgctatagagtcagatctgaagggcacaccttttcctctaaggtccacagctttttttcactgttgactttctaaccatcatcattttgggggtttggcttttagctgcagtgttgtggtataaatggcacgagtgattggaccagtggcccaccagcatcttgcccctcagatcgaaaagtggaggtaattttgtcggcaatgtttctgttattgacctctttgtttaaatgtttaattacctcggaaactgcagtcatagaggacctagaccttctattgagaaacaggggaccttgaataaaagagaggccagggcaacaaccttgggtaattagaaaagtcagaaaaacatacgaacaaactcatttagactagagacactgtgattgatcttgctacactagactattacattagaggggaacagttacttttgtgtgaaagtaggagagggttgtgtctagatatttcttaagcaagaagtaggtctccttatggttaaagtgaaatgtatagggttgagatagaaaagtttctccctctccctctttctctgctcttcttccttggagatggcagaatccagccccttaggaaatgaatcataggtgaaggagtaaggagttgagggagacagagttagtggaactactgaaacaacctgtccaattaatttggacctccagaataggctctgagaagaagccacaactatcttccaactagactgaatccctgaggtcttgtctcctcatgttatctgctcctgaaggggtttggaaatctccagggtttttcaggtttgtggagaaagactaggacaaccactgaccagcaactgccctggcacttggtagggctatgatggatttactgaatgttgaagcagaaagtgaaatgcaaaccaattttagtattgcatgccctatgttaatctctggtcagcactgagtgttcaaagacagtaggacgtcggttgctgacctgcctcttagaagctagtttaactcagcgggtaaggatctaggacttctacattagttaccactgtaatgataacaccaccagaaaagtctgtagtttaatatttcccaccttatgcctgtttcttcattcacgcaaagaaaataaaaatataatacctaagcctctttgtattacataaagcaaaatgcaaagcactgtatcttccaaatacttcctcttgatatggtggaattatagagtagtatcatttgtaactgaaatgtcttctagggttgctatgcgaaagcaagactgtggtttcattccaatttcctgtatatcggaatcatcaccatctgtgtatgtgtgattgaggtaagagcttaaccacagggttattgtgaggattacatgagttaagtcaggtaagatttcagaataataccaggtacacagtatttacacaataaatgttagctatttttactaatatatgaattcccccagccaagtagcaaataatgtaattaacaatttgctttaaggtatatagaaaatgtgctataagaacatctcttggccgggcgtggtggctcacgcctgtaatcccagcactttgggaggctgaggcaggcagatcacgaggtcaggagatcaagaccatcctggctaacatggtgaaaccccgtctctactaaaaatacaaaaaattaaccagacgtagtggcaggtgtctgtagtcccagctacttgggaggctaaggtaggagaatggcgtgaacctgggaggcggcgttgtagtgagtcaagatcgtgccactgcctcctgcctgggcgacagagcgagactctgtctccagaaaaaaaaaaaaaaaaaagaacatctctctggtcaattcattcctcagagatatgagtgattcacatgattcacagtcaaacaaaaaagccaccaagcagaatcccactgtgatccctcctcagctggtctgaaaaatacgaattgataaagtatttcatttgaaaacctgatcttgcatgttaaggggctgatgacgaaaattgtaatcaatttcctctttgtttctgtgcttagtttgacaagtgatgggtgaattgagggtagttttttgtcctttttaataaaaaaggacaaaaataatgtgatatttctaacatttttctacccaagtgttgggtatatcatagattagttaaaactcaatcaggaagctcagagaaaatgatttttctctgtttggaaacaaaggaggcacagagcatggatagagataactcattgcacagtgttcagtgagcagaatatgaccatcctagcagcagggcttctgtgacttcctcagaagataaaacatgctccagtactttacagcctgttatcttgtcatcattgaccccgtttctctcctcactgctattctttaaccaaaggaaagagctcctgagagagacttgaaagtaatggttggaagggtggtttcagtgtaatggatacattctttttctcagaggccaatcccaggcattgtgaaagaaatggcttttcttatgaagacttcaaattttcccaactcttttcacaggtgttggggatgtcctttgcactgaccctgaactgccagattgacaaaaccagccagaccatagggctatgatctgcagtagttctgtggtgaagagacttgtttcatctccggaaatgcaaaaccatttatagcatgaagccctacatgatcactgcaggatgatcctcctcccatcctttccctttttaggtccctgtcttatacaaccagagaagtgggtgttggccaggcacatcccatctcaggcagcaagacaatctttcactcactgacggcagcagccatgtctctcaaagtggtgaaactaatatctgagcatcttttagacaagagaggcaaagacaaactggatttaatggcccaacatcaaagggtgaacccaggatatgaatttttgcatcttcccattgtcgaattagtctccagcctctaaataatgcccagtcttctccccaaagtcaagcaagagactagttgaagggagttctggggccaggctcactggaccattgtcacaaccctctgtttctctttgactaagtgccctggctacaggaattacacagttctctttctccaaagggcaagatctcatttcaatttctttattagagggccttattgatgtgttctaagtctttccagaaaaaaactatccagtgatttatatcctgatttcaaccagtcacttagctgataatcacagtaagaagacttctggtattatctctctatcagataagattttgttaatgtactattttactcttcaataaataaaacagtttattatctcaatcacaacattcctatatatcaaacactccttccatgacccagcctgattaccctgattaatgcaccaaaccaggtgtattaattgtctcctgctgcataaaatattactccaaaatttagtggctgaggacaacaaacatttattatctcatggtttttgtgggtcaggaatctaggagcagcttagctgggtgattctggttcacagtctctcatgtaactgcaatcaacatgtcagcctgggctgcag

SEQ ID NO: 914 - DNA, 1798 bp, Homo sapiens
taatagaaattaaaatgcttcttcatacatagctgaatagaaaagaatttgttgagaaggaattcagggtagcgaatattaggcataagcttgtagtttacttgtaacatctcaacactatcttttaactacaattaccaaaaactaggatccattattctttcacaaactaacaaattatattgctatcccaacagattgccaagtatgcccacggacatggaacacacaggacattacctacatcttgcctttctgatgacaacagttttttctttgtctcctggaacaaaagcaaactatacccgtctgtgggctaacagtacttcttcctgggattcagttattcaaaacaagacaggcagaaaccaaaatgaaaacattaacacaaaccctataactcctgaagtagattataaaggtaattctacaaacatgcctgaaacatctcacatcgtagctttaacttctaaatctgaacaggagctttatataccttctgtcgtcagcaacagtccttcaacagtacagagcattgaaaacacaagcaaaagtcatggtgaaattttcaaaaaggatgtctgtgcggaaaacaacaacaacatggctatgctaatttgcttaattataattgcagtgctttttcttatctgtacctttctatttctatcaactgtggttttggcaaacaaagtctcttctctcagacgatcaaaacaagtaggcaagcgtcagcctagaagcaatggcgattttctggcaagcggtctatggcccgctgaatcagacacttggaaaagaacaaaacagctcacaggacccaacctagtgatgcaatctactggagtgctcacagctacaagggaaagaaaagatgaagaaggaactgaaaaacttactaacaaacagataggttagtgaagaaaaatgcaaagtagcaatgagaaggcttatggagtaaaaatgaagtcagttggtatttaatcccaaagtgttgttctgattatctaaaatttgacatggtagaccttgcaatttagaatcaagcaggtgagacagggagaagtatgcctgcttaattatttaaactgtgtacttttgttttgacactgaatattttaaaaagcaaataataaaataactaagcatttgaggaaaattttaaggataaattgaggaaactgattaatagagatagcaagggataattaaataaatattccctatgtagcaacagtggttagatgatctttgtctgaatgtaataaaactttgaatagttttagtgtgtccttaaagccaagtatatgctttaacatcaaatggaagtcaaattcctaatgcatagatagagagagctaaactgtgtaatttaatggtatcttccttgctggatgtggcagaatccacaccagcttatcaaccaacacagctaattttagaataggtcctttatctttccatatggcacacgtaagaaagtgtttttctactattaatattaaattaaaacctttacttttgtataataaattaaaactcagaataaacctgtgaccacgtatatttgcattcactttattactttagagaacacattgtaaagatcaataagaaatagagcacaactaaaataaataagatttatagccacaccaataggctagtgtaaacgaaagtatgtttcactgtttatgattaataatattcatcttttctataaatactacttactggaacattaacaacaagtccaaaggttgattaattttgactcaggagcagagctatgattata

SEQ ID NO: 915 - DNA, 1838 bp, Homo sapiens
aattcttcacctcttttctcagctccctgcagcatgggtgctgggccctccttgctgctcgccgccctcctgctgcttctctccggcgacggcgccgtgcgctgcgacacacctgccaactgcacctatcttgacctgctgggcacctgggtcttccaggtgggctccagcggttcccagcgcgatgtcaactgctcggttatgggaccacaagaaaaaaaagtagtggtgtaccttcagaagctggatacagcatatgatgaccttggcaattctggccatttcaccatcatttacaaccaaggctttgagattgtgttgaatgactacaagtggtttgccttttttaagtataaagaagagggcagcaaggtgaccacttactgcaacgagacaatgactgggtgggtgcatgatgtgttgggccggaactgggcttgtttcaccggaaagaaggtgggaactgcctctgagaatgtgtatgtcaacacagcacaccttaagaattctcaggaaaagtattctaataggctctacaagtatgatcacaactttgtgaaagctatcaatgccattcagaagtcttggactgcaactacatacatggaatatgagactcttaccctgggagatatgattaggagaagtggtggccacagtcgaaaaatcccaaggcccaaacctgcaccactgactgctgaaatacagcaaaagattttgcatttgccaacatcttgggactggagaaatgttcatggtatcaattttgtcagtcctgttcgaaaccaagcatcctgtggcagctgctactcatttgcttctatgggtatgctagaagcgagaatccgtatactaaccaacaattctcagaccccaatcctaagccctcaggaggttgtgtcttgtagccagtatgctcaaggctgtgaaggcggcttcccataccttattgcaggaaagtacgcccaagattttgggctggtggaagaagcttgcttcccctacacaggcactgattctccatgcaaaatgaaggaagactgctttcgttattactcctctgagtaccactatgtaggaggtttctatggaggctgcaatgaagccctgatgaagcttgagttggtccatcatgggcccatggcagttgcttttgaagtatatgatgacttcctccactacaaaaaggggatctaccaccacactggtctaagagaccctttcaacccctttgagctgactaatcatgctgttctgcttgtgggctatggcactgactcagcctctgggatggattactggattgttaaaaacagctggggcaccggctggggtgagaatggctacttccggatccgcagaggaactgatgagtgtgcaattgagagcatagcagtggcagccacaccaattcctaaattgtagggtatgccttccagtatttcataatgatctgcatcagttgtaaaggggaattggtatattcacagactgtagactttcagcagcaatctcagaagcttacaaatagatttccatgaagatatttgtcttcagaattaaaactgcccttaattttaatatacctttcaatcggccactggccatttttttctaagtattcaattaagtgggaattttctggaagatggtcagctatgaagtaatagagtttgcttaatcatttgtaattcaaacatgctatattttttaaaatcaatgtgaaaacatagacttatttttaaattgtaccaatcacaagaaaataatggcaataattatcaaaacttttaaaatagatgctcatatttttaaaataaagttttaaaaataactgc

SEQ ID NO: 916 - DNA, 1935 bp, Homo sapiens
ccgcgccgctccccgttgccttccaggactgagaaaggggaaagggaagggtgccacgtccgagcagccgccttgactggggaagggtctgaatcccacccttggcattgcctggtggagactgagatacccgtgctccgctcgcctccttggttgaagatttctccttccctcacgtgatttgagccccgtttttattttctgtgagccacgtcctcctcgagcggggtcaatctggcaaaaggagtgatgcgcttcgcctggaccgtgctcctgctcgggcctttgcagctctgcgcgctagtgcactgcgcccctcccgccgccggccaacagcagcccccgcgcgagccgccggcggctccgggcgcctggcgccagcagatccaatgggagaacaacgggcaggtgttcagcttgctgagcctgggctcacagtaccagcctcagcgccgccgggacccgggcgccgccgtccctggtgcagccaacgcctccgcccagcagccccgcactccgatcctgctgatccgcgacaaccgcaccgccgcggcgcgaacgcggacggccggctcatctggagtcaccgctggccgccccaggcccaccgcccgtcactggttccaagctggctactcgacatctagagcccgcgaagctggcgcctcgcgcgcggagaaccagacagcgccgggagaagttcctgcgctcagtaacctgcggccgcccagccgcgtggacggcatggtgggcgacgacccttacaacccctacaagtactctgacgacaacccttattacaactactacgatacttatgaaaggcccagacctgggggcaggtaccggcccggatacggcactggctacttccagtacggtctcccagacctggtggccgacccctactacatccaggcgtccacgtacgtgcagaagatgtccatgtacaacctgagatgcgcggcggaggaaaactgtctggccagtacagcatacagggcagatgtcagagattatgatcacagggtgctgctcagatttccccaaagagtgaaaaaccaagggacatcagatttcttacccagccgaccaagatattcctgggaatggcacagttgtcatcaacattaccacagtatggatgagtttagccactatgacctgcttgatgccaacacccagaggagagtggctgaaggccacaaagcaagtttctgtcttgaagacacatcctgtgactatggctaccacaggcgatttgcatgtactgcacacacacagggattgagtcctggctgttatgatacctatggtgcagacatagactgccagtggattgatattacagatgtaaaacctggaaactatatcctaaaggtcagtgtaaaccccagctacctggttcctgaatctgactataccaacaatgttgtgcgctgtgacattcgctacacaggacatcatgcgtatgcctcaggctgcacaatttcaccgtattagaaggcaaagcaaaactcccaatggataaatcagtgcctggtgttctgaagtgggaaaaaatagactaacttcagtaggatttatgtattttgaaaaagagaacagaaaacaacaaaagaatttttgtttggactgttttcaataacaaagcacataactggattttgaacgcttaagtcatcattacttgggaaatttttaatgtttattatttacatcactttgtgaattaacacagtgtttcaattctgtaattacatatttgactctttcaaagaaatccaaatttctcatgttccttttgaaattgtagtgcaaaatggtcagtattatctaaatgaatgagccaaaatgactttgaactgaaacttttctaaagtgctggaactttagtgaaacataataataatgggtttatacgacagcaacgga

SEQ ID NO: 917 - DNA, 512 bp, Homo sapiens
aaggtatgtgtgtttggggtccctgtgcagacatgccccacagtgcagccgaacatgctgaacgtgcacctgctgcctcacacacatgatgacgtgggctggctcaaaaccgtggaccagtacttttatggaagtgagtagaggatggggactggtcctgggatccccatggtccctgtaatccctctggtcctggacattagggtggggccagtgctaccctaatatccagggtttgggctcctctgtctaggaataacccccttggctctgctgttccctgagagccttatccctgttatccacagtcaagaatgacatccagcacgccggtgtgcagtacatcctggactcggtcatctctgccttgctggcagatcccacccgtcgcttcatttacgtggagattgccttcttctcccgttggtggcaccagcagacaaatgccacacaggaagtcgtgcgagaccttgtgcgccagggtgagcttaccccaaggaagtgaaaagagg

SEQ ID NO: 918 - DNA, 254 bp, Homo sapiens
ctgaccctgaccttgcctgtcctggcacagggcgcctggagttcgccaatggtggctgggtgatgaacgatgaggcagccacccactacggtgccatcgtggaccagatgacacttgggctgcgctttctggaggacacatttggcaatgatgggcgaccccgtgtggcctggcacattgaccccttcggccactctcgggagcaggcctcgctgtttgcgcaggtgcgacccgggacctctcttgggcccact

SEQ ID NO: 919 - DNA, 579 bp, Homo sapiens
tcacactgccttttcctccctcatccccagatgggcttcgacggcttcttctttgggcgccttgattatcaagataagtgggtacggatgcagaagctggagatggagcaggtgtggcgggccagcaccagcctgaagcccccgaccgcggacctcttcactggtagggggcttggtgagggcagggccagccatggtgccacacactcagaagggccctgggcttgatatctgctctgttgtcactgccctggaattcctatagtctgggaacaaaggccctgcatttccttttgcattgggacacaaattctgaagcccatcctgggtgggacatggccggctttgaaaccagggaaggtctgggtgatgggccaccccttgaacttggtgtgacctgcaggtgtgcttcccaatggttacaacccgccaaggaatctgtgctgggatgtgctgtgtgtcgatcagccgctggtggaggaccctcgcagccccgagtacaacgccaaggagctggtcgattacttcctaaatgtggccactgcccaggtaaccctggtgtccagaaccttcgagtcc

SEQ ID NO: 920 - DNA, 178 bp, Homo sapiens
ctggcttaaggactcccctcttgcctgcagggccggtattaccgcaccaaccacactgtgatgaccatgggctcggacttccaatatgagaatgccaacatgtggttcaagaaccttgacaagctcatccggctggtaaatgcgcaggtcagtgcgcctaccctgtggtacccttgtg

SEQ ID NO: 921 - DNA, 508 bp, Homo sapiens
gagggctcactccgtcgcctcccccagcagcaggcaaaaggaagcagtgtccatgttctctactccacccccgcttgttacctctgggagctgaacaaggccaacctcacctggtatttggggaaactggggagcttgggggggttggcatgccccgtgggtcatgaccctgccctcaatgcccctgccgctgtaggtcagtgaaacatgacgacttcttcccttacgcggatggcccccaccagttctggaccggttacttttccagtcggccggccctcaaacgctacgagcgcctcagctacaacttcctgcaggtgggtaggagccgggctagagggggcatgcagccccgaggcccgacaggctgggcgccccaacatacccctctgcctccaggtgtgcaaccagctggaggcgctggtgggcctggcggccaacgtgggaccctatggctccggagacagtgcacccctcagtaagtgtcgggcccaagaggggaagaggt

SEQ ID NO: 922 - DNA, 170 bp, Homo sapiens
aacctcactggactcattgtctatgagcagatgaggcgatggctgtgctccagcatcacgacgccgtcagcggcacctcccgccagcacgtggccaacgactacgcgcgccagcttgcggcaggctgggggccttgcgaggtgcgcggggcgagacttgggagacacggg

SEQ ID NO: 923 - DNA, 546 bp, Homo sapiens
acccaccggtccctttgcgctcttccgcaggttcttctgagcaacgcgctggcgcggctcagaggcttcaaagatcacttcaccttttgccaacagctaaacatcagcatctgcccgctcagccagacggcggcgcgcgtgacgcgggacgggaggggtggatctagggcagatgggctttagagggggtagttggaaaatgtttttggaggactatacaggagtgaaattacgtgggctgcgaagctgggtcagcagagagaacaacgcatctcgagggggcttggccttaagtgccgtgaccacactaggaccagccaggggtgtttctgtgcaaagtgggtgggtttggagaaggcctgctgtgacccatgccctctctgacccccgcctccccagttccaggtcatcgtttataatcccctggggcggaaggtgaattggatggtacggctgccggtcagcgaaggcgttttcgttgtgaaggaccccaatggcaggacagtgcccagcgatgtgagcccaaacaacgaatattcccccgct

SEQ ID NO: 924 - DNA, 246 bp, Homo sapiens
tgactcagtttccctcctcctttatccgaggtggtaatatttcccagctcagacagccaggcgcaccctccggagctgctgttctcagcctcactgcccgccctgggcttcagcacctattcagtagcccaggtgcctcgctggaagccccaggcccgcgcaccacagcccatccccagaagatcctggtcccctgctttaaccatcgaaaatgaggtgagaccccatttcaatcccctttcctgc

SEQ ID NO: 925 - DNA, 368 bp, Homo sapiens
aaacccatctgtggacccttttctgcccagcacatccgggcaacgtttgatcctgacacagggctgttgatggagattatgaacatgaatcagcaactcctgctgcctgttcgccagaccttcttctggtaagggaagatcaccaggcctgagggtgggctggtggtggtcggcatggagctaggtccccttacctgactctcacctgccccaactccaggtacaacgccagtataggtgacaacgaaagtgaccaggcctcaggtgcctacatcttcagacccaaccaacagaaaccgctgcctgtgagccgctgggctcagatccacctggtgaaggtcagggactaggaatgatgagtgggcagt

SEQ ID NO: 926 - DNA, 370 bp, Homo sapiens
cttacacccacctcacccgttgtcccgcagacacccttggtgcaggaggtgcaccagaacttctcagcttggtgttcccaggtggttcgcctgtacccaggacagcggcacctggagctagagtggtcggtggggccgatacctgtggggtgagtggcacaggctgggagaggggtgtggaagcaagggcagaggggtttatccaaggctcacaaccttgccatcccattgggtacagcgacacctgggggaaggaggtcatcagccgttttgacacaccgctggagacaaagggacgcttctacacagacagcaatggccgggagatcctggagaggaggtggggggtgactgagagcactgagggggt

SEQ ID NO: 927 - DNA, 353 bp, Homo sapiens
caagcctgatcagctcacccccaaccccaggcgggattatcgacccacctggaaactgaaccagacggagcccgtggcaggaaactactatccagtcaacacccggatttacatcacggtagctctcccccatcctgcacctccccacctcgatagaaagggaatcaccccttatctgcagcatctcaaagctgcctggggttggggttgactgccctctactttcacccttcaactcccaggatggaaacatgcagctgactgtgctgactgaccgctcccaggggggcagcagcctgagagatggctcgctggagctcatggtgagtgggtcagagcccatccgaggccag

SEQ ID NO: 928 - DNA, 288 bp, Homo sapiens
ctcaccccctcctggccactctccccccaggtgcaccgaaggctgctgaaggacgatggacgcggagtatcggagccactaatggagaacgggtcgggggcgtgggtgcgagggcgccacctggtgctgctggacacagcccaggctgcagccgccggacaccggctcctggcggagcaggaggtcctggcccctcaggtggtgctggccccgggtggcggcgccgcctacaatctcggggctcctccgcgcacgcaggtgaggggcagcggggtaggcagagaggac

SEQ ID NO: 929 - DNA, 426 bp, Homo sapiens
tccaactcagccccgccctctctcccgcagttctcagggctgcgcagggacctgccgccctcggtgcacctgctcacgctggccagctggggccccgaaatggtgctgctgcgcttggagcaccagtttgccgtaggagaggattccggacgtaacctgagcgcccccgttaccttgaacttgagggtgagaagggcaaaattgagaaggagatcggagagaggcaagagagagggagagaagagaaacctggctttgccccaactcatctgggcccatccccttccccgcaggacctgttctccaccttcaccatcacccgcctgcaggagaccacgctggtggccaaccagctccgcgaggcagcctccaggctcaagtggacaacaaacacaggtggggccctggtcaggggtagggaagggg

SEQ ID NO: 930 - DNA, 420 bp, Homo sapiens
tcactcctccttccccctgcacctctccaggccccacaccccaccaaactccgtaccagctggacccggccaacatcacgctggaacccatggaaatccgcactttcctggcctcagttcaatggaaggaggtggatggttaggtctgctgggatgggccctccaagcccaagcctcctgctccgggggcagaccagactctgactctcctcttggggctgctgcattaaaacgtactactaagactcaggtcgctctgtgactgagtgtgggttttttttgtctgttatttgcttgttagagggggacagaatttatgacccagagccgggtgtggtggcttgctcctgtaatcctaacaactctggaggctgaggagagagaatcacttgagcccaggagatctagactagcctgggc

SEQ ID NO: 931 - DNA, 4315 bp, Homo sapiens
ggaaattgttcctcgtctgataagacaacagtggagaaaggacgcatgctgtttcttagggacacggctggcttccagatatgaccatgtatttgtggcttaaactcttggcatttggctttgcctttctggacacagaagtatttgtgacagggcaaagcccaacaccttcccccactggattgactacagcaaagatgcccagtgttccactttcaagtgaccccttacctactcacaccactgcattctcacccgcaagcacctttgaaagagaaaatgacttctcagagaccacaacttctcttagtccagacaatacttccacccaagtatccccggactctttggataatgctagtgcttttaataccacaggtgtttcatcagtacagacgcctcaccttcccacgcacgcagactcgcagacgccctctgctggaactgacacgcagacattcagcggctccgccgccaatgcaaaactcaaccctaccccaggcagcaatgctatctcagatgtcccaggagagaggagtacagccagcacctttcctacagacccagtttccccattgacaaccaccctcagccttgcacaccacagctctgctgccttacctgcacgcacctccaacaccaccatcacagcgaacacctcagatgcctaccttaatgcctctgaaacaaccactctgagcccttctggaagcgctgtcatttcaaccacaacaatagctactactccatctaagccaacatgtgatgaaaaatatgcaaacatcactgtggattacttatataacaaggaaactaaattatttacagcaaagctaaatgttaatgagaatgtggaatgtggaaacaatacttgcacaaacaatgaggtgcataaccttacagaatgtaaaaatgcgtctgtttccatatctcataattcatgtactgctcctgataagacattaatattagatgtgccaccaggggttgaaaagtttcagttacatgattgtacacaagttgaaaaagcagatactactatttgtttaaaatggaaaaatattgaaacctttacttgtgatacacagaatattacctacagatttcagtgtggtaatatgatatttgataataaagaaattaaattagaaaaccttgaacccgaacatgagtataagtgtgactcagaaatactctataataaccacaagtttactaacgcaagtaaaattattaaaacagattttgggagtccaggagagcctcagattattttttgtagaagtgaagctgcacatcaaggagtaattacctggaatccccctcaaagatcatttcataattttaccctctgttatataaaagagacagaaaaagattgcctcaatctggataaaaacctgatcaaatatgatttgcaaaatttaaaaccttatacgaaatatgttttatcattacatgcctacatcattgcaaaagtgcaacgtaatggaagtgctgcaatgtgtcatttcacaactaaaagtgctcctccaagccaggtctggaacatgactgtctccatgacatcagataatagtatgcatgtcaagtgtaggcctcccagggaccgtaatggcccccatgaacgttaccatttggaagttgaagctggaaatactctggttagaaatgagtcgcataagaattgcgatttccgtgtaaaagatcttcaatattcaacagactacacttttaaggcctattttcacaatggagactatcctggagaaccctttattttacatcattcaacatcttataattctaaggcactgatagcatttctggcatttctgattattgtgacatcaatagccctgcttgttgttctctacaaaatctatgatctacataagaaaagatcctgcaatttagatgaacagcaggagcttgttgaaagggatgatgaaaaacaactgatgaatgtggagccaatccatgcagatattttgttggaaacttataagaggaagattgctgatgaaggaagaccttttctggctgaatttcagagcatcccgcgggtgttcagcaagtttcctataaaggaagctcgaaagccctttaaccagaataaaaaccgttatgttgacattcttccttatgattataaccgtgttgaactctctgagataaacggagatgcagggtcaaactacataaatgccagctatattgatggtttcaaagaacccaggaaatacattgctgcacaaggtcccagggatgaaactgttgatgatttctggaggatgatttgggaacagaaagccacagttattgtcatggtcactcgatgtgaagaaggaaacaggaacaagtgtgcagaatactggccgtcaatggaagagggcactcgggcttttggagatgttgttgtaaagatcaaccagcacaaaagatgtccagattacatcattcagaaattgaacattgtaaataaaaaagaaaaagcaactggaagagaggtgactcacattcagttcaccagctggccagaccacggggtgcctgaggatcctcacttgctcctcaaactgagaaggagagtgaatgccttcagcaatttcttcagtggtcccattgtggtgcactgcagtgctggtgttgggcgcacaggaacctatatcggaattgatgccatgctagaaggcttggaagccgagaacaaagtggatgtttatggttatgttgtcaagctaaggcgacagagatgcctgatggttcaagtagaggcccagtacatcttgatccatcaggctttggtggaatacaatcagtttggagaaacagaagtgaatttgtctgaattacatccatatctacataacatgaagaaaagggatccacccagtgagccgtctccactagaggctgaattccagagacttccttcatataggagctggaggacacagcacattggaaatcaagaagaaaataaaagtaaaaacaggaattctaatgtcatcccatatgactataacagagtgccacttaaacatgagctggaaatgagtaaagagagtgagcatgattcagatgaatcctctgatgatgacagtgattcagaggaaccaagcaaatacatcaatgcatcttttataatgagctactggaaacctgaagtgatgattgctgctcagggaccactgaaggagaccattggtgacttttggcagatgatcttccaaagaaaagtcaaagttattgttatgctgacagaactgaaacatggagaccaggaaatctgtgctcagtactggggagaaggaaagcaaacatatggagatattgaagttgacctgaaagacacagacaaatcttcaacttatacccttcgtgtctttgaactgagacattccaagaggaaagactctcgaactgtgtaccagtaccaatatacaaactggagtgtggagcagcttcctgcagaacccaaggaattaatctctatgattcaggtcgtcaaacaaaaacttccccagaagaattcctctgaagggaacaagcatcacaagagtacacctctactcattcactgcagggatggatctcagcaaacgggaatattttgtgctttgttaaatctcttagaaagtgcggaaacagaagaggtagtggatatttttcaagtggtaaaagctctacgcaaagctaggctaggcatggtttccacattcgagcaatatcaattcctatatgacgtcattgccagcacctaccctgctcagaatggacaagtaaagaaaaacaaccatcaagaagataaaattgaatttgataatgaagtggacaaagtaaagcaggatgctaattgtgttaatccacttggtgccccagaaaagctccctgaagcaaaggaacaggctgaaggttctgaacccacgagtggcactgaggggccagaacattctgtcaatggtcctgcaagtccagctttaaatcaaggttcataggaaaagacataaatgaggaaactccaaacctcctgttagctgttatttctatttttgtagaagtaggaagtgaaaataggtatacagtggattaattaaatgcagcgaaccaatatttgtagaagggttatattttactactgtggaaaaatatttaagatagttttgccagaacagtttgtacagacgtatgcttattttaaaattttatctcttattcagtaaaaaacaacttctttgtaatcgttatgagtgtatatgtatgtgtgtatgggtgtgtgtttgtgtgagagacagagaaagagagagaattc

SEQ ID NO: 932 - DNA, 3532 bp, Homo sapiens
gaattctatggagtgtaattttgtgtatgaattatatttttaaaacattgaagagttttcagaaagaaggctagtagagttgattactgatactttatgctaagcagtacttttttggtagtacaatattttgttaggcgtttctgataacactagaaaggacaagttttatcttgtgataaattgattaatgtttacaacatgactgataattatagctgaatagtccttaaatgatgaacaggttatttagtttttaaatgcagtgtaaaaagtgtgctgtggaaattttatggctaactaagtttatggagaaaataccttcagttgatcaagaataatagtggtatacaaagttaggaagaaagtcaacatgatgctgcaggaaatggaaacaaatacaaatgatatttaacaaagatagagtttacagtttttgaactttaagccaaattcatttgacatcaagcactatagcaggcacaggttcaacaaagcttgtgggtattgacttcccccaaaagttgtcagctgaagtaatttagcccacttaagtaaatactatgatgataagctgtgtgaacttagcttttaaatagtgtgaccatatgaaggttttaattacttttgtttattggaataaaatgagattttttgggttgtcatgttaaagtgcttatagggaaagaagcctgcatataattttttaccttgtggcataatcagtaattggtctgttattcaggcttcatagcttgtaaccaaatataaataaaaggcataatttaggtattctatagttgcttagaattttgttaatataaatctctgtgaaaaatcaaggagttttaatattttcagaagtgcatccacctttcagggctttaagttagtattactcaagattatgaacaaatagcacttaggttacctgaaagagttactacaaccccaaagagttgtgttctaagtagtatcttggtaattcagagagatactcatcctacctgaatataaactgagataaatccagtaaagaaagtgtagtaaattctacataagagtctatcattgatttctttttgtggtaaaaatcttagttcatgtgaagaaatttcatgtgaatgttttagctatcaaacagtactgtcacctactcatgcacaaaactgcctcccaaagacttttcccaggtccctcgtatcaaaacattaagagtataatggaagatagcacgatcttgtcagattggacaaacagcaacaaacaaaaaatgaagtatgacttttcctgtgaactctacagaatgtctacatattcaactttccccgccggggtgcctgtctcagaaaggagtcttgctcgtgctggtttttattatactggtgtgaatgacaaggtcaaatgcttctgttgtggcctgatgctggataactggaaactaggagacagtcctattcaaaagcataaacagctatatcctagctgtagctttattcagaatctggtttcagctagtctgggatccacctctaagaatacgtctccaatgagaaacagttttgcacattcattatctcccaccttggaacatagtagcttgttcagtggttcttactccagcctttctccaaaccctcttaattctagagcagttgaagacatctcttcatcgaggactaacccctacagttatgcaatgagtactgaagaagccagatttcttacctaccatatgtggccattaacttttttgtcaccatcagaattggcaagagctggtttttattatataggacctggagatagggtagcctgctttgcctgtggtgggaagctcagtaactgggaaccaaaggatgatgctatgtcagaacaccggaggcattttcccaactgtccatttttggaaaattctctagaaactctgaggtttagcatttcaaatctgagcatgcagacacatgcagctcgaatgagaacatttatgtactggccatctagtgttccagttcagcctgagcagcttgcaagtgctggtttttattatgtgggtcgcaatgatgatgtcaaatgcttttgttgtgatggtggcttgaggtgttgggaatctggagatgatccatgggtagaacatgccaagtggtttccaaggtgtgagttcttgatacgaatgaaaggccaagagtttgttgatgagattcaaggtagatatcctcatcttcttgaacagctgttgtcaacttcagataccactggagaagaaaatgctgacccaccaattattcattttggacctggagaaagttcttcagaagatgctgtcatgatgaatacacctgtggttaaatctgccttggaaatgggctttaatagagacctggtgaaacaaacagttcaaagtaaaatcctgacaactggagagaactataaaacagttaatgatattgtgtcagcacttcttaatgctgaagatgaaaaaagagaagaggagaaggaaaaacaagctgaagaaatggcatcagatgatttgtcattaattcggaagaacagaatggctctctttcaacaattgacatgtgtgcttcctatcctggataatcttttaaaggccaatgtaattaataaacaggaacatgatattattaaacaaaaaacacagatacctttacaagcgagagaactgattgataccattttggttaaaggaaatgctgcggccaacatcttcaaaaactgtctaaaagaaattgactctacattgtataagaacttatttgtggataagaatatgaagtatattccaacagaagatgtttcaggtctgtcactggaagaacaattgaggaggttgcaagaagaacgaacttgtaaagtgtgtatggacaaagaagtttctgttgtatttattccttgtggtcatctggtagtatgccaggaatgtgccccttctctaagaaaatgccctatttgcaggggtataatcaagggtactgttcgtacatttctctcttaaagaaaaatagtctatattttaacctgcataaaaaggtctttaaaatattgttgaacacttgaagccatctaaagtaaaaagggaattatgagtttttcaattagtaacattcatgttctagtctgctttggtactaataatcttgtttctgaaaagatggtatcatatatttaatcttaatctgtttatttacaagggaagatttatgtttggtgaactatattagtatgtatgtgtacctaagggagtagtgtcactgcttgttatgcatcatttcaggagttactggatttgttgttctttcagaaagctttgaatactaaattatagtgtagaaaagaactggaaaccaggaactctggagttcatcagagttatggtgccgaattgtctttggtgcttttcacttgtgttttaaaataaggatttttctcttatttctccccctagtttgtgagaaacatctcaataaagtgctttccaaaaaaaaaaaaaagtcgacgcggccgcgaattc

SEQ ID NO: 933 - DNA, 211 bp, Homo sapiens
ctagcccctctgaggttcccataggttaggggaacaatgctttttcttccacaggagctgctgcaggcttagtgcctggtgggccaggctttggcccgggagtagttggtgtcccaggagctggcgttccaggtgttggtgtcccaggagctgggattccagttgtcccaggtgctgggatcccaggtgctgcggttccaggtgagctggg

SEQ ID NO: 934 - DNA, 118 bp, Homo sapiens
tgctgcctccaatgctgctgcctgagcatgttgtgtcccttttggtctctccaggggttgtgtcaccagaagcagctgctaaggcagctgcaaaggcagccaaatacggtgagtgcta

SEQ ID NO: 935 - DNA, 118 bp, Homo sapiens; identical to SEQ ID NO: 934

SEQ ID NO: 936 - DNA, 229 bp, Homo sapiens
gcccagcctctctcactgaggcttcttttctacttggctcccttccctctgcaggggccaggcccggagtcggagttggaggcattcctacttacggggttggagctgggggctttcccggctttggtgtcggagtcggaggtatccctggagtcgcaggtgtccctagtgtcggaggtgttcccggagtcggaggtgtcccgggagttggcatttcccgtgagcctta

SEQ ID NO: 937 - DNA, 106 bp, Homo sapiens
gaggagacccaggcacggcttctgagggtctctatctttctcgtttccttgtagccgaagctcaggcagcagctgccgccaaggctgccaagtacggtaagtgccc

SEQ ID NO: 938 - DNA, 151 bp, Homo sapiens
cccccaaaaagtgagtactggaggggcaaggctgaaagttctccactccccgaggtgctgcaggagcaggagtgctgggtgggctagtgccaggtccccaggcggcagtcccaggtgtgccgggcacgggaggagtgccaggtgagctgtg

SEQ ID NO: 939 - DNA, 121 bp, Homo sapiens
agcagggaggggtgtgagagattactctctcaccccttctcttcacacctccaggagtggggaccccagcagctgcagctgctaaagcagccgccaaagccgcccagtttggtaagtcccc

SEQ ID NO: 940 - DNA, 226 bp, Homo sapiens
tctgtcctctttgatcaggtcttggttaatgatcagctcttctcaatcttgcagggttagttcctggtgtcggcgtggctcctggagttggcgtggctcctggtgtcggtgtggctcctggagttggcttggctcctggagttggcgtggctcctggagttggtgtggctcctggcgttggcgtggctcccggcattggccctggtggagttgcaggtgagtttca

SEQ ID NO: 941 - DNA, 109 bp, Homo sapiens
agcctccatgggccccgcctccatctctaatccccctctctctccctccctcagctgcagcaaaatccgctgccaaggtggctgccaaagcccagctccgtgagtgcct

SEQ ID NO: 942 - DNA, 190 bp, Homo sapiens
tccttaggggcatgctccctgcctgctgtcgccaccactgccctctgtctgcaggagctgcagctgggcttggtgctggcatccctggacttggagttggtgtcggcgtccctggacttggagttggtgctggtgttcctggacttggagttggtgctggtgttcctggcttcggggcaggtgcagatga

SEQ ID NO: 943 - DNA, 109 bp, Homo sapiens
gtgcagatgagggagttaggcggagcctgtcccctgagctcagggaaggagatccctcctcctctcagcacctccccagcaccccctcatcacccaggggtgcatagta

SEQ ID NO: 944 - DNA, 103 bp, Homo sapiens
tcccaggcacagagctcggctcctgaccactccccaacttttctttctccccagtacctggagccctggctgccgctaaagcagccaaatatggtgagtgcac

SEQ ID NO: 945 - DNA, 136 bp, Homo sapiens
agggagacccatcgttcagaaatggaacactcattttccctcctctccccgcaggagcagcagtgcctggggtccttggagggctcggggctctcggtggagtaggcatcccaggcggtgtggtgggtgagttgat

SEQ ID NO: 946 - DNA, 124 bp, Homo sapiens
ggagggaatctaaccagtacagagtgcctccctgaactcggtctgtgttcccaggagccggacccgccgccgccgctgccgcagccaaagctgctgccaaagccgcccagtttggtgagcactg

SEQ ID NO: 947 - DNA, 139 bp, Homo sapiens
gcttcagtcccacctttctgaccagcggagtctaatgctcagctgtctccacaggcctagtgggagccgctgggctcggaggactcggagtcggagggcttggagttccaggtgttgggggccttggaggtgagagttg

SEQ ID NO: 948 - DNA, 103 bp, Homo sapiens
  misc_feature 100: n = A,T,C or G
gcctgaccaggtggcattggcattcctgagccgtcatgtgcctcatctccccaggtatacctccagctgcagccgctaaagcagctaaatacggtgagtnccc

SEQ ID NO: 949 - DNA, 118 bp, Homo sapiens
agggcctcttcccgatgggggtgtcttatcctgaccccacctgcctcttctcaggtgctgctggccttggaggtgtcctagggggtgccgggcagttcccacttggaggtaggggtgg

SEQ ID NO: 950 - DNA, 109 bp, Homo sapiens
gctggagtcagtttccacccctaccaacccaccaacctgaaatctctcctgcaggagtggcagcaagacctggcttcggattgtctcccattttcccaggtatgccagg

SEQ ID NO: 951 - DNA, 352 bp, Homo sapiens
  misc_feature 23: n = A,T,C or G
tagtgagggggattggctgggcntggtggcctcacgcctgtaatcccagcactttgggaggcctaggtgggtggatcaacttgaggtccaaggagttcgagacccagtctggtcaaacatggtgaaccctgtctctactaaaaaaaatggcaaaaattagccaaacgtggtggacgcctgtaatcccagctactcgggaggctgaggcgggagaatcactggagcctgggaagcggaggttgcagtgagccaagatcgcaccactgcactccagcctgggtgacagagcaagaccccatctcaaaaaaataataataaaataaaatataaaaaattatatagtgggggggat

SEQ ID NO: 952 - DNA, 1448 bp, Homo sapiens
  misc_feature 857, 861, 863, 876, 924, 925, 926, 939, 946, 962, 963, 1018,1227, 1228, 1231, 1315, 1359, 1365, 1366, 1368: n = A,T,C or G
agccgaaactgagaggggccggactcacagtgatgtgcacctcctcccgtccaggtggggcctgcctggggaaagcttgtggccggaagagaaaatgagcttcctaggacccctgactcacgacctcatcaacgttggtgctactgcttggtggagaatgtaaaccctttgtatccccatcccatgcccctccgattccccaccccaggagggaacgggcaggccgggcggcttgcagatccacagggcaaggaaacaagaggggagcggccaagtgccccgaccaggaggccccctacttcagaggcaagggccatgtggtcctggccccccaaccccatcccttcccacctaggagctccccctccacacagcctccatctccaggggaacttggtgctacacgctggtgctcttatcttcctggggggagggaggagggaagggtggcccctcggggaaccccctacctggggctcctctaaagatggtgcagacacttcctgggcagtcccagctccccctgcccaccaggacccaccgttggctgccatccagttggtacccaagcacctgaagcctcaaagctggattcgctctagcatccctcctctcctgggtccacttggccgtctcctccccaccgatcgctgttccccacatctggggcgcttttgggttggaaaaccaccccacactgggaatagccaccttgccccttgtaagaatccatccgcccatccgtccattcatccatcggtccgtccatccatgtcccagttgaccgccggcaccattagctggctgggtgcacccaccatcaacctggttgacctgtcatggccgcctgtgccctncctnanccccatcctacantcccccagggcgtgcggggctgtgcagactggggtgccaggcatctcnnncccacccggggtntccccanatgcagtactgtatannccccatccctccctcggtccactgaacttcagagcagttcccattcctgccccgnccatctttttgtgtctcgctgtgatagatcaataaatattttattttttgtcctggatatttggggattatttttgattgttgatattctcttttggttttattgttgtggttcattgaaaaaaaaaagataatttttttttctgatccggggagctgtatccccagtagaaaaaaaattttaatcactctaatatacctctggatganncanacctttttttttattaagaaaagagatttaactgcttcagaaatgactaataaatgaaaaccctttaaaggaaactgtgtcttngcttccttggtatgatttaatctgccttcaactgttggcctggntggggnnangggctctgcttcagggaacctccaccacccaaattgtatttgagaggttgcccaaccaaaagcccctgctgcctggcttc

SEQ ID NO: 953 - DNA, 1752 bp, Homo sapiens
ggcacgaggttagaagagagcccactaattcaaggactcttaccgtgggagcaactgctggttctatcacaatgaaacggctggtttgtgtgctcttggtgtgctcctctgcagtggcacagttgcataaagatcctaccctggatcaccactggcatctctggaagaaaacctatggcaaacaatacaaggaaaagaatgaagaagcagtacgacgtctcatctgggaaaagaatctaaagtttgtgatgcttcacaacctggagcattcaatgggaatgcactcatacgatctgggcatgaaccacctgggagacatgaccagtgaagaagtgatgtctttgatgagttccctgagagttcccagccagtggcagagaaatatcacatataagtcaaaccctaattggatattgcctgattctgtggactggagagagaaagggtgtgttactgaagtgaaatatcaaggttcttgtggtgcttgctgggctttcagtgctgtgggggccctggaagcacagctgaagctgaaaacaggaaagctggtgtctctcagtgcccagaacctggtggattgctcaactgaaaaatatggaaacaaaggctgcaatggtggcttcatgacaacggctttccagtacatcattgataacaagggcatcgactcagacgcttcctatccctacaaagccatggatcagaaatgtcaatatgactcaaaatatcgtgctgccacatgttcaaagtacactgaacttccttatggcagagaagatgtcctgaaagaagctgtggccaataaaggcccagtgtctgttggtgtagatgcgcgtcatccttctttcttcctctacagaagtggtgtctactatgaaccatcctgtactcagaatgtgaatcatggtgtacttgtggttggctatggtgatcttaatgggaaagaatactggcttgtgaaaaacagctggggccacaactttggtgaagaaggatatattcggatggcaagaaataaaggaaatcattgtgggattgctagctttccctcttacccagaaatctagaggatctctcctttttataacaaatcaagaaatatgaagcactttctcttaacttaatttttcctgctgtatccagaagaaataattgtgtcatgattaatgtgtatttactgtactaattagaaaatatagtttgaggccgggcacggtggctcacgcctgtaatcccagtacttgggaggccaaggcaggcatatcaacttgaggccaggagttaaagagcagcctggctaacatggtgaaaccccatctctactaaaaatacaaaaaattagccgagcacggtggtgcatgcctgtaatcccagctacttgggaggctgaggcacgagattccttgaacccaagaggttgaggctatgttgagctgagatcacaccactgtactccagcctggatgacagagtggagactctgtttcaaaaaaacagaaaagaaaatatagtttgattcttcatttttttaaatttgcaaatctcaggataaagtttgctaagtaaattagtaatgtactatagatataactgtacaaaaattgttcaacctaaaacaatctgtaattgcttattgttttattgtatactctttgtcttttaagacccctaatagccttttgtaacttgatggcttaaaaatacttaataaatctgccatttcaaatttcaaaaaaaaaaaaaaaaaaaaaa

SEQ ID NO: 954 - DNA, 1763 bp, Homo sapiens
ggggtacctcatgtgacaagttccaatttcttttcaagtcaattgaactgaaatctccttgttgctttgaaatcttagaagagagcccactaattcaaggactcttactgtaggagcaactgctggttctatcacaatgaaacggctggtttgtgtgctcttggtgtgctcctctgcagtggcacagttgcataaagatcctaccctggatcaccactggcatctctggaagaaaacctatggcaaacaatacaaggaaaagaatgaagaagcagtacgacgtctcatctgggaaaagaatctaaagtttgtgatgcttcacaacctggagcattcaatgggaatgcactcatacgatctgggcatgaaccacctgggagacatgaccagtgaagaagtgatgtctttgatgagttccctgagagttcccagccagtggcagagaaatatcacatataagtcaaaccctaatcggatattgcctgattctgtggactggagagagaaagggtgtgttactgaagtgaaatatcaaggttcttgtggtgcttgctgggctttcagtgctgtgggggccctggaagcacagctgaagctgaaaacaggaaagctggtgtctctcagtgcccagaacctggtggattgctcaactgaaaaatatggaaacaaaggctgcaatggtggcttcatgacaacggctttccagtacatcattgataacaagggcatcgactcagacgcttcctatccctacaaagccatggatctgaaatgtcaatatgactcaaaatatcgtgctgccacatgttcaaagtacactgaacttccttatggcagagaagatgtcctgaaagaagctgtggccaataaaggcccagtgtctgttggtgtagatgcgcgtcatccttctttcttcctctacagaagtggtgtctactatgaaccatcctgtactcagaatgtgaatcatggtgtacttgtggttggctatggtgatcttaatgggaaagaatactggcttgtgaaaaacagctggggccacaactttggtgaagaaggatatattcggatggcaagaaataaaggaaatcattgtgggattgctagctttccctcttacccagaaatctagaggatctctcctttttataacaaatcaatgaaatatgaagcactttctcttaacttaatttttcctgctgtatccagaagaaataattgtgtcatgattaatgtgtatttactgtactaattagaaaatatagtttgaggccgggcacgtggctcacgcgtaatcccgttacttgggaggccaaggcaggcattatcaatcttgaggccaggagttaaagagcagcctggctaacatggtgaaaccccatctctactaaaaatacaaaaaattagccgagcacggtggtgcatgcctgtaatcccagctacttgggaggctgaggcacgagattccttgaacccaagaggttgaggctatgttgagctgagatcacaccactgtactccagcctggatgacagagtggagactctgtttcaaaaaaacagaaaagaaaatatagtttgattcttcatttttttaaatttgcaaatctcaggataaagtttgctaagtaaattagtaatgtactatagatataactgtacaaaaattgttcaacctaaaacaatctgtaattgcttattgttttattgtcccgaattcagttggtttaatatattgtcctctgtaatttcgatccttcttaa

SEQ ID NO: 955 - DNA, 420 bp, Homo sapiens
  misc_feature 36: n = A,T,C or G
ctcttgtcagctgtctttcagaagacctggtggggnaagtccgtgggcatcatgttgaccgagctggagaaagccttgaactctatcatcgacgtctaccacaagtactccctgataaaggggaatttccatgccgtctacagggatgacctgaagaaattgctagagaccgagtgtcctcagtatatcaggaaaaagggtgcagacgtctggttcaaagagttggatatcaacactgatggtgcagttaacttccaggagttcctcattctggtgataaagatgggctggcagcccacaaaaaaagccatgaagaaagccacaaagagtagctgagttactgcccagaggctgggcccctgacatgtacctgcagaataataaagtcatcaatacctcaaaaaaaaaaaaaaaaaaaaa

SEQ ID NO: 956 - DNA, 149034 bp, Homo sapiens
cctggagatcctgttgactgtagcatggagggggcttgtgcagctgaatgtctgcatgcaggtggtgggagttctggaatatgatggagctggaggtgggaagagaagtaggcttggggcagctctctcatgccacctcattctggccaaaactcaggtcaaactgtgaagagtctaaatgtgaatctgcccttcaaggtggctacaaaggtatctttgtcaaggtaggagaccttgtggcctccacgtgcacttccagggcctgcttgggcctcttctacgggtctgtcctgagtcttctatgaatctgtccttcagggcagattcatatttagactcttcacagtttgacctgagttttggccagaataaggtgacatttagtttgttggcttgatggatgacttaaatatttagacatggtgtgtaggcctgcattcctactcttgcctttttttttgcccctccagtgttttgggtagttttgctcccctacagccaaaggcaaacagagaagttggaggtctggagtggctacataattttacacgactgcaattctctggctgcacttcacaaatgtatacaaactaaatacaagtcctgtgtttttatcacagggaggctgatcaatataatgaaattaaaagggggctggtccatattgttctgtgtttttgtttgtttgttttgtttgtttctttttttgtttttgtggcctccttcctctcaatttatgaagagaagcagtaagatgttcctctcgggtcctctgagggacctggggagctcaggctgggaatctccaaggcagtaggtcgcctatcaaaaatcaaagtccaggtttgtggggggaaaacaaaagcagcccattacccagaggactgtccgccttcccctcaccccagcctaggcctttgaaaggaaacaaaagacaagacaaaatgattggcgtcctgagggagattcagcctagagctctctctcccccaatccctccctccggctgaggaaactaacaaaggaaaaaaaaattgcggaaagcaggatttagaggaagcaaattccactggtgcccttggctgccgggaacgtggactagagagtctgcggcgcagccccgagcccagcgcttcccgcgcgtcttaggccggcgggcccgggcgggggaaggggacgcagaccgcggaccctaagacacctgctgtaccctccacccccaccccaccccacccacctccccccaactccctagatgtgtcgtgggcggctgaacgtcgcccgtttaaggggcgggccccggctccacgtgctttctgctgagtgactgaactacataaacagaggccgggaagggggcggggaggagggagagcacaggctttgaccgatagtaacctctgcgctcggtgcagccgaatctataaaaggaactagtcccggcaaaaaccccgtaattgcgagcgagagtgagtggggccgggacccgcagagccgagccgacccttctctcccgggctgcggcagggcagggcggggagctccgcgcaccaacagagccggttctcagggcgctttgctccttgttttttccccggttctgttttctccccttctccggaaggcttgtcaaggggtaggagaaagagacgcaaacacaaaagtggaaaacaggtaagaggctctccagtgacttacttgggcgttattgttttgtttcgaggccaaggaggcttcgggaagtgctcggtttcggggactttgatccggagccccacatccccaccacttgcaactcagatgggaccggaggcggtgttaaatggggagacgatgtcctagtacgagctctggtgaccccaggactctgcgctgctgcgcttggggcttgcccgacggtggagaccggggagcatctctgggcgtggagacccgggcgcagtaccccgggctcagaggggtcgggggttcccgggcgtgctgagggcgctgctgccgggtggggagagctgcaggtccggcaccgagcgctgctttgttcggagggccctgagctggctagaaacccttctggttgcaggtcggccagtacctacggagacaaatgccagcactgagtcttcactcggttcttaagaagctggtctgttctgacctgggaattggctatatgctccccgggactggagcggcacagtcccggactgtgaatccgggaactcgagttggaggtgtcccaaacggtccgtggtgctattgctcactagaggccttgggtctttgtttgacctgaggggtagggaggtcctgcctacagtctccgtgcgctcagctgagctggtgtccctggcgcagagcgcggacgagttttgtttcctttctttttcttttttttctttcctttaagtctcggtctgtcgcccaggctggagtgcaatggaacgatctccgctcactgcaacctccgcctcccgggttcaagcgattctcctgcctcagcctcctgagtagctgggattacaggcgcgtcaccacatccagctaatttttgtatttttagtagagacggggtttcaacttgttggccaggctggtctcgaaccctcgacctcaggtgatccaccggcctcggcctccccaagtgctgggattataggcgtgagccaccgcgcgcggccgagttttgtttcttttaaaaacaagacttaggagagcctgcggagacccggaggtggggtgcccaatcctccctctcccacgttccctgcagccccatcttccagaccgttgctgctggtctctcggggcagcttctgcctgggcgcagatggggaagctgggccgaggtggtgccgtggaatgaccgggagtaaccccggcgggcggcgcagaactcggagctccgccgcggggctgggctgggctctgccgtgagggtgggggtgctgggcgcgcgggctgcggtggcccccggagactggcccgcagcgcctcctggccggaggacctaggaatcggccggctctactaggtgtctttgctcgcggttccgactgtgaatccggtgaagaccggtggttgcagacggggaggaactatgaggttgaggcgaaagcccgttttgtttttttttttttgtttttttggttttttttttgttagcgtgtttgccaactcccaggccattggtaaagcaggaaggttcttggggcggcggacggtgccagggttatgtgtaggtgcctctttaggtatatcttttatcaaaaagaagcaaagaaataagattaaaaataaacaaagaaaaaagttgtctggcactggcagtaattggcctgcctttgcagcactgataccattagcttttaaaatccgacttttcattgacacttcaagaagagaatgggtagtatatacacattcatctcatagtggacaaatttcatatttaaaaaaaccttctgggtactgaaatcagcaagtcacttgccctccatggccgaatccctgcttccacgaagagaacctcacaaaaatttcccccaagttaaagagtggaattttcttgatttttttgttcttttttttttaacggccgtagtttagaaccccagacttaaattatgatcttcttttcaaacaaaacttaaagtccttaagttttcatctccccttttatttcaacctattcttctcatacctaccacaaaaataatggaggctttctgttgagaaactttccgtttctgttgagagtatcattctcttgagaaactttctcctaaatcagagaaagtatggaagcatggaaagtattcctgagtagaacctctacagatattacaatatttttcaaatacaaagtttccattgtcagcctgtttcccaagtgcttccacaaaccattaaataattccacaaaccattaaaataattaatgctagggaattttaggaaaacattggtttacaatcagaaggaccggggaagtgggtcttcagccttcacgatgactacaagccatttaagggactagaattgctactgttgtcagagcaatttaggagtctgtatttgagcacccgcatagtgttccagaatgacatatctgactgtaacctggacacgtgtgatatgttgtctcccctgcagatgagcatttgaaatctcaaccctcgtatttctacgagtgcaggcctataatggaccctgggcacattttttttttttttgagatgcagtctcgctctgtttcccaggctggagtgcagtggcacgatatggctcactgcaacctccacctcctgggttcaagagattctcctgcctcagcctcctgagtagctgggactataggcgcacgccaccatgcctggctagtttttgcattttcagtagagacagagtttcaccatgttggccaggatggtctcgatttcctgacctcttgatccacccgcctcggcctcccaaagtgctgggattacaggcgtgaggcaccgcgcccgacccctggacacattttgacttagaacatattttcggtttgtgtgagacagtgcattagtgcaggattggaaaagagtgatcaggaattgattgttttcaaggattggttccttctgctcaaggaagtcccattgtaaacataaaaaaatgaatgaaactgaagaagttcagtgacttagctttttattatcttctgtagtacttacctttttggagaggagttggttgggatatttttccatttaaattttttttttaaagggatcttctctcccgtaagccgggatacttaagctatatatgtagtggctacaaattaaggtcttcactgttttcatttttagctgctagaataagtgaacattaccttagatagactcttctaattatgaagatatctagatgtctagaaaatatcaaaatgcatgtggtttttgcatttctaaaatacttttaaaaccaaatactttttcttttttttttttttctgagatggagtcttgctcttttgcctaggctggagcgcagtagaatgatcttggctcactgcaacttccgcctctcaggttcaggtgattctcctgcctcaacctcctgagtagctgggattacaggtgcgtgccaccacacccggctagtttttgtgtttttagtagggacagggtttcaccatgttggccaggctggtctcaagctcctgacctcaagtgatctgccagcctcagcctcccaaagtgctgggattacaggcatgagccaccacacctggcctcaaatacatttttttaagtatccagatattaaataaataataccattatagtagttgttatggtcatttactctagcatcaaatgttaaaagatcattctgaacacttgttttgtttatgctgagagaaggcctactccaaaaaatgcaaccatcttcgtatctgcatgtggatacaaccatgaatggccaaagttattgcagtgttgaatagacacttatatagcactgtgtggcaagtactgtttgaaatgtttttcacgtgtttattcattgtatttattttgagatagggtcttgctctgttgcacagggtggagtgcagctgcacagacaaggctcactgcaacctcagcctcctgcgctcacgtgatcctcatacatcagcctcttaaggagctggggccacaggcacgcaccactgctcctggctaaatttttacaattttttgtaaagacaaggtctcactatcttgctcagactggtcttgaactcctgggctcaagtgatcctcccacatcagcctcccaaagtgctgggattacaggcataagccactgtgcaggtcatcaaatgctaattgaattttcacaacaaaaccatttattgtccctagtttacaagattaagtaaatgagaagctaatttttctctggctatataccttgcaagaggcagagctaagacttgaacccagccagagttctttaactccagcactaacatttcagctgctgcaaccagggagcttttcaaggatgatcaccacattctctacattcatctgctataatccttatcagaatctacagcctgtatcatattttccttgttgctgtgagtgggtcagccaaattctctttaacttgaaaccttggttgcgtagggattgcaacatcctggaaagaatagaataaaatttactcaactcaattttttacttggttcataatgaaaactatactattgcttcagtcagatgtttgcgaatagctgtgtgatctcaaaatgttttcctatgtgatctatagaaaatggaatgatagagtattaggctgtaagggcctaagaaacaaaggaaaaagagaagtgaactgttagtttagttgtaaaacctaactttggtgaattgtaaaaatttgttataatacaatatgattcttgcttgtcctgtccttgatgaagttgtggaccttttgaaataagctatttctctgttactgctgttactgtttagaaatcaaatttagttttttcttaagatatacgtatttttggaagataaacacagtttcaaagtctgccttgttggctgggtgcactggctcattgttgtattcccagcactttgggaggccaaagcaggaggatcacttgaggtcaggagttcaagaccagcctggcaaatatggtgaaaccccgtctctactaacaatacaaaaattagctgggcgtggtggtgggtgcttgtaatcccagctactgggattgggaggctgaagtagaagaattgcttgaacctgggaggcggaggttgcactgagtcgagatcgtgccactttactccaacctgggcgacagagtgagactccgtcttgaaaaaaaatgtctgccttgtaaaagtgaaataggatgagaaagtgcctttcttattaattggtgtaatgaattagaaataaactctttgaagacacctcttggtaaaaatagttacatttactgttgatttatggtatgttggatatgtttttaagttttccgtgtaataactcagttcattctcatgagtgaaataggtgcttttattgtctttatagatgggaaactgaggtataggcaggctaggtacattattatggagttcgtaagtagtggagctgaagtcgcatcccagacagtttggcttccgtgagtttaccaatctcatggtaaagactttgtcagactatcaaagttttgacaaatgaaatattagcaaaaggccaaaagggattctctattttcatttgagtatcttcacctgaaaatagttgcctgaataagtagcctgcatagaaaggtacattttagaaatacttgaggccagagaatgaaaagcttacataaaattgatttccggtggggccttcagttactctccattctacgaagaccacaaatagcattcaggcaaagagcatttattccaacaatggaggagcactggatttggttcctaaaacaaaataaagtttgaaatcctgtctttcccatgttgaaaacaaagttggtacaaaaccctttagcttttgcaaacctcctttaagacccgatttaaatgcctccctcctcatgaagctcttctggatccactctttcccatcactaagttgaaagtaagatccccttctctttacttccattagacttggattacagcactctttgtatcatgtatttaattctgttttttaattacagttaacatttatttgtcttcctcttgagtgtatgcttctctagaggaaggtctttgattcattctcccctggccttaattcatcccacttaatatggaaaaaatttaataaatgctgacttgaataagtccaacaaggagaatgggaagctcatgtttgcttcctgtcttctaaaagactacttaagataacagggtaatcacagaaaagcattagaaatagagttatatgagaaacaactgtagttaaggctaggtttatgttagactgagaaattttagtgcatacttaagttatttaggccaggttactttttgtagaacaaacatttcagtttcgctcagtttcatttccgtttctgaggcagctgtgatttaagaaaatgctctagtctgtggcattccatattcaagtactttgagttgtatattaatttatttttgttaataagagtgagatgactcactaagtaatttagagatttaaacacttttttaaaaaacagtaacttcatatgcattggatctattcttctataaagtcttttcttggggggtgtttgtttaaaattccccggtgttttctctgccaaatccaacttccaagaagcatttggaagtcaaaacattttatctggttagtcttaaagtccagatattttgtgatagctggtatttagtttatgatatttcccaggaagaactttttagtagttgaaccatttatgaaagacttccttgaagctaccttagagagttgatttagttcttcctaaataagtaaatagaatattagtattaggacatcttggagtatagatgcaaatattggtgaaaaagaacatggatatcagagtcaaattaatgtagattggaattctggttattactaatggatatctgacattaggcaagttgctgatcactctttgcctcagtttcatcatctgtaaaataggtatttgtgtttgtgtataatgtgaaccgtataatataatgcttggcctatagtgaaatttattcatacgagtgttttcagtgattttaaaagcttgctttaggccgggcgcgatggcttctgcctataattccagcactttgggaggccaaggtgggcggatcatgaggtcaggagttcgagaccagcctgaccagcatggtgaaaccccgtctctactaaaaatacaaaaattagctgggcgtggtggtgcaagcctgtaatcccagctactcaggaggcttaggcagaagaatcgcttgaacccaggaggcagagattgcagtgagccgagatggtgccactgcacagagcgagactccatctcaaaaaaacaaaacaaaacaaaacaaaaatcttgctttatagtttacttccacatcaaattgtctttatcccatgttacttgcattgatatcccagacatgaaaagaaaaaaagatgataacaatgacagttattaaattaggttccactcttattctagatcaccaattcatattactattcagacttggaacattaaattttagttaaactttttttcaaatatgcatataattgtcagtggttactatattttggggaagagattgttgacttctttgaagaaagatacggattttctcttcagaagaaatacacatgggctcatataatccaaattttatgtgtaattacagggtgttcatgaatgcccacaaatccattaagccatgtgaccttggacaagtcattttacttttctgttttttaggttgttggtctgtaaaatgatactacttgacttttaaagagcccttcaagctcttatgtcctctaaccccaggtctgtattcagaagaaggggtggtcctttaattagagccatctagagatctgaggaacatgctgggcattagtgtaacataccatgtggattttgagaggtaaagaaaaaataaccagggaatgcctcagagcattcctgatcagatcgatgacagaagaaaggaatgagagggaggagaggaagctgttgaaatttcctatttacctgctttgagtgaatgaagatttgaatcatagaaccagaaggggttctcatctgaaatgcaaaggaaggaggagttggtttaattcaataagtttcagttgagtaaacatgatttagtgagatactgttcttgcttctgactcaccatttggaaaatctctctaaaataaaattggactctccatctcggacatcattttgggtgtaggttttgcttttttttttgagatggagtctcgttatgttgcccaggctggagtgcagtggcgcaatctcggctcactgcaacttccgcctcccagattcaagcagttctcctgcctcaacctcctgagtagctgggactacaggcgtatgccaccatgtccggctaatttttgtatttttttaatagagacggggttttactatggtggctaggctggtctttaactcctgaccttgtgatctgcccaccttggcttcccagagtgctgggattacagatgtgagccacagtgcccggcctaagttttacttcttataatggactcctgttaagccaataggtgatgaaaggaaaccataaccaactcttcaggctcattcatccttcaagaatagcatgctagtacccatcctaggaggagaattggactatacctcatgaggatagtttgaagtatctcagaagaccctcactgggggtaggtcggtaagacacaaagctttctaaagcactgtaccaaatttgttgtttgagagatcataacaaattagaagtggaaagaagaaggagtaaaaggaagaagaggtttctggccaggagcagggagggggaaggagctgctaggaagatgtttggttgtcatatccctgttcacccttgctttgcaaaattcttgtaggatgccaggttgggagtaattgtttttcacaagagtcaaaccacgcttgttttcttgaagaagcaagtctttggagggtggtggcttgaaatctgttggatctggtatttaggtgatacactttgacataaaggcaacactgatgcaagcagcagctttccttggaaaggcagggagaaagtgaaggcccagactgatgagcttacactgacctgcagacccttctccattcccaggcatgtttggtgcagagtttaccttagtggggttaggctgtgtctggtactgtgagagagaaggaagaagaagatatgatattaacaacaacaatacatatttatatttgaaaattaaatgcactaatacacctatagtgctattaaacaaatttatttgttcagcaaatgtttgttaaacaccatgtactgtggaaagtactaggtgctggacagaggtcaaaagacttttaagaatctgccaccattaatgatctctttctgcttggcattcaaggctctttgaaataagactgtgacccactttgatagttttgtcctggattataagacacatgctcgaaggaactatagctggttttctcaccagactgattaacatatagtatggtttggtacctgttaaatgagtctctctctacaggttttcatcttctactttaagaaccccttcctggcattgtttggctcctcattgttctggaatctcatgtccatctcatgtatttgccttggttcacacttgatcttctgctcatattcctcacctactgaaattttacccatcaaccagaccgtgggtgatggaacacagcatgggctagttcttcttatatatgatctcatttaattttcactggaactctgagataggtagcatttcagcccactcaagttgactcaaatttttgtaatcatcaatatattttaaaataactttatatttgacctgtaattggaaaaccaatatgagttatcataaatgaaaggtaattttaaaaataattaggatgaagacaaattatttttctcacagtctatgtataagataaactattggttcccaaaggccccagctgacaatgagacttctcttactttgttgaaaagggaattagcaagcattaaagaggtgtcaaaaagaagactaaacaaaagcttactcctttttttttttgagacgagtcttgctctgttgcccaggctggagtgcagtggcaccacctcggctcactgcaacctcttcctcctgggttcaagcgattctcctgcctcagcctccctagtagctgggattacaggtgcatgccaccacacccggctaatttttgtatttttagcagagatggggttcgtcatgttggccaggctggtctccaactcctgacctcaggtgatccacccacctcggcctcccaaagtgctagaatcacaggtgtgagccgccgcacccggccgcttactccttaatgtactaagaatgttatatataggctgaagaagtgctgaaaagaaccatattttctcatgatgtggttcaatgtttaatactgtgcttgttcatctcctaaaatcctctgaatatcacttaaattcatcctgtgtaactctcccacatttggggaaatactgagcttgcctattattatattagccccatatttcagatgatgcacctgagccgaggagaagttaaataacttgttcatggttccatatttggctaatggcagagccagggattcaaactcttgtctctctgactcccaggtttgtgcttttcccacttggctgaatttctcatgctacctcctccataacacctttcctagaacttttaaggaatgcttcccctgttctctcatagcattttaatgtaagttgccaaagtgtcccagtttgcacccctaccagcaatgtgggagaaaatagcaacatatttttgatgttggggtctagtgttacggtttcttctgctctttgggatgtatattccatggctactgaatacccaagtcccaaacagttttcttagactcagaaggtcatccacttcagcttcttcatcaaaaagacatattttctggctgggcacggtggctcacacctgtaatcacagcactttgggaggtggaggcaggagaattgcttgaacccaggaggctgaagttgcagtgagcccagatcgtgccactgccctccagcctgggtgacagagcgaaactctgtgtcaagaaacaaaaaaaaggacttgttttctgttccattacccacagtggtagaatggcgtgctaaatttattctccagctgccattaactgcaaattaaaatcttagtctcttgcctctttaatccaggcttcttcatactataccagaatttaggataactattacagtgccctttataggagagaaagaagaaattgtgtctgtagatgtctgttcctttcagcttaaaatggacactgaaatgttaaatattggactggcctcatttatttctcctgtctgttggtccaatttgaatcttaaggcgtctttcaactggaattttttgtttctctcaactaaaaattgttctttgtaagtttgaatcagaacaaaatcctgaatgttgagggtttcctaaaggctgtttctttatgcaaaagcctgaaacccgatgttgatgttggctgcttaaaattaactgtgaatcaaggcagggtttttatttttattttttttttactttaatgattgtgttaattatagtgaaaaccttgagttcacgagaaagaaagcctttggtcaagtattgtttattaagttgtcagtcttgttgcaggatttgcaaatttagtggaattagtgccatttttcagtttacaattccagtcacatttcacatgatcagagcatggctttcttctctgtggagcaaatagagggctgtctgacacttggttccagtggcttccattaagcagagtggatatgtccctggagtctgcagagaagggcatggcactctgaccccagatggcactccgttttgggacattgtccaattctagttcatagcatatgtgaccaacaccagctctcacctgatgtaaacacttagcgcgttgttgcttgggggattggattgtgtgaatttttcaaaactacagttgacagaaggaggctaccaaaaatgaaacccaataattccatttttgggaattattcccacttttgttccatttttcccactttgttctttggcacacagaatgtttgatttgtgaaaatcttaataacagtagttttttctataaggaacactcagaatcttgataatattggaataatacagatccttttgtaggatcctctcagacctcatataatagagttcatgtagtcaatatttaaagaaaaacacccttaagtttttgtttttcagaatcacaagtaagtggatttaaacttgtgatcttattcccctttcttctcttaatttagtgaggcagccagcgagagggtttgttttggttattctaaagaaggagtttgcttgtaagttttggagggcaagacttagactctgtgtctctgtgcttgccctggaactttgattaaattgtcactaaccgagttagctggccctcgccgggctgcagaaatagaagtgtcttgcacacatgacatatgactgtctcaagagctggctggtgaaaggacgttctggagaaggctgccgatactgtatgaactagaactggacaagagcctggagattggataactcagtttggcgcaagtaaagggaataaaagtgttaaggtggcaaaattgtatccaggtgtttataggctccctgagttcctgacttgagcctatctatgggtttagagttcaaggctctttaccagtgctgacaatcttatactctaggttgaacctccggggaaggtgcccttgcttgatggcatgtttaccaggggttctagagcctcaatcacagattctctctagctcacatgaagttaatgaaaatgaatgtgcttccctacaaattagagaggctttgaggaaaaatcagattaaatgcactcctgcttgaacttatgtttcttagaacacagctggaaattttgtcacacaaacctttactttcagtgacatttcttgactggtttgttactgtagtgaatctgctttaactatcttttcttatcgctgaggttttacttccattctacatgtgattgtggagcgctgcgtcattgtgggttcagtgtagtggagagtaggaagatggtgagacacagtagcttgttgcacattgcttaatttatcagggatcactgatgagttagtacactagagaagattgtaggtagagctgaaaagatggaggaattataaggctcagatttctctctttttttttttttttaagatggagtttcactcttgttgtccaggctggaattcaatggcatgatctcggctcactgcaacctctgcctcccgggttcaagtgagacttgatggtctcacttgatggtttcctggctcagcctcctgagtagctgagattacaggcacccactaccatgcccagctacttttttgtatttttagtggagatggggttttatcatgttgaccaggctggtctcgaacttctgacctcaggtgatcacctgcctcagcctcccaaagtgcagggattacaggcatgagccactgcgtctggccaaggctcagatttctaatagagatttctaatggacatagaggctggaggaaatgggatggacaggaaaactgagtcaggtgccaaaaacttgtagggggccgggtgcggtggctcacgcctgtaatcccagcactttgggaggctgaggcgggtggatcacgaggtcaggagatcgagaccatcctggctaacacggcgaaaccccgtctctactaaaaatacaaaaaattagccgggcgtgttggcaggcggctgtcggtagtcccagctactcgggaggctgaggcaggagaatggcgtgaagccgggaggcggagcttgcagtgagccgagatcgcgccactgcactccagcctgggcgacagagccagactccatctaaataaataaatagataaataaataaaataaaataaaaacttgtagggaggtggcagtgtgctatggaggataggtgcaacctctgtgagaatgtagagaaaatagtataagtgagtggtgaggacccccaagagggggttttatagtaaaacaatggtcagaagtggcaacaggataccgtataatgctttcacctctaccaatgcactgggtactggagagcgctccagtttgctctggaaaggccctttctgtggacaaagaatacagaaaagagattcctttaataaaccacccactctgtgtcccacccttgatgaatacttcactgtgaaattgccagaattaatcatggtaatagctactgtacacttactttgttccaggaactggataaatgttttacatacattatcagttctattttttggagaagatacaggggctcagagtccctagggttccagagctggtgagtagcagagtcaggattcaaacccagctttctctgactctaaaacctcctttcttcctgctgaaacaattaactcaagacaacaaaggagttaaggatttggggagttttctgcatggtagaatagacccaaaggaaaagaaagaaagacagtgactaagatttgggtttgtctgccccaccaaatgctttgagcactttcataaatataaatccttcaggttgggagaaggttgaacatctgaagacactgattcttcagagatgtaatccaaacaaagtgatctttggtgatatggtcactaaaccatttatcccaaaattctcttggaaaaccgtcctataacagcagggaacattatccagccaagtttttctgcaaataaagggttgctgatagaggcttgcctgcttgtgtttctgtagctcagggtgtttatgaattcactaatcccttcccttcagatcccttttattctggtgttatgattgtgactgaaaaaaattgattttttttctatgacatagaatgttgaaaggttgatttcttttctagaggaaagattctttttttctatgtgctacataccccccgaccagggaaaaggcaaatagtggtattgtttgctgaagtcttcctttgaaggttgcttggtgtttgcttagtggaaatcagcaggggaagagaggctatctctaacattttgttagagtttcttcgtagttctatagtgatgaaacaaggacttggggtacaggacagatctgctttcagaaatcctggctcttgtgaggtttagaagccctgagaccatttagctggtggcaacgggaatgttgagggtgataaataggatctttggttgtccaagtatcagtgacatgatatagatggagttaaacctttaggatctccttatttatttgtttgtttatttttgagacagggtcttgcactgtagcccaggttggagtatggtggcatgatcataactcactgcagcctcaaactcctgggctcaagcgatcctgctgcctcagcctcccaaggtgttaggattacaggcatgagccgccacacccggtcaggatctcctgtaaaattatattgttgacaacatgaagaattatgcttctcaaaagctagttatagatttgtacaatattcatagatttcttgtttcagtttttacaaattcatagcccttattttgaaaattagctattagcaataattttgtctaggaaattggatgtgtattcaagtgaaagaaggaagtacagttacctattatcttattgtaactaacaatcaagtaagtgtgatgcatttggtactttaaaaactgcacccaagttacagattattggaattaataaaattcactggatctatatatttttaaacggacagtgtgatagcagaacctcttatagaatgatagaattcctctggaatgattggataacttcatttcatccttgacttttaccttggaggatttcttaccccttttggcttctcaaatttgactattaaaatgttgcctttaaaaataggaacacagtttcaggggggagtaccagcccatgacccttctgcaaggccccctaactcaaggtagtttccctggaactgtggtttatggaatgtttcaggagtgtgaggaggtataatttaaggctgtcctagcaaggatacccttaaggatagagggcccagtagcatctggaggccagaaaagttaaactgaggcagtcagattagcttcaggctcaattaagctgatgggtcagcctgggagaaattgcaggatgactctcaatatcccctcccacccccacagcagccacgatctgtctgtctttaatcatgggtgcagtgaacctgttctttccaggtgtcttggccttcagtaaccttgttaggcttgtccctgaacgtggctaccgatccaaagacacatgatcagagaggcaattagagaacagaccttttccaaagcaagcatgttctgttgggcttagaagtttcatgtcctaatattataggaccctgtgcatctctctggagatgaggcacatgagtcatatctgtgattcttgcttttgtgtcaacatctcatgaataggcaatcagagctttggcaccaatgtattttcagttcatatctgatgtagttaaatccacctcctgctttgtagtttactggcaagctgtttttgatataagacatctagaacactgtaaatatataacatttttatttgtctattatacctcaattacgaaaaagacatctagaagcaacctcatcaagagagatactgaggccgggcatggtagctcacacttgcaatcccattactttgggaggctgaggcaggtagatcacttgaggtcaagagtttgaaaccagcctggccaacatgttgaaaccctgtctctattaaaaatacaaaaaagttagctgggcttggtggtgggcacctgtaatcccagctactccggaggctgaggcaggagaatcacttgaacctgggaggcagaggttgcagtgagctgagatcacaccactgcactccaacctgggcaccagagtgagattacatctaaaaaataaaataaagtaataaaaaagagagatattgatagctgttgttggaaatttcaacttccatctcacttctggtaactttttggaagtttgttgaacaaagtggaatacacgcacatacacacacacacatactctcttgtttgtttaaggtttaatgaaatagctgtcatataatcactgtttttgaaagaggagaattagttgctatctgtacattttgggtatgtgaactatttggatagaactctgagaaatgcattcagaacaacaaacaaaatcataggagaaatagctaagtgggaaggggcatataagagttgttgaaaaagttatttcttgagaaaccagctctaatgctaggcaagtcacttgctttgggggaggcctcagcttctctgtctataagattgcagcaggggtgtagtgggaatgagtcttcaacattccaagagattttatctactaatacgacagtcaaatggagcatgactttgtggaagcctctcctcttccacccagaggggccaatttctctgtcccagtgagatgttgacacttgtatgatccctgcttggagacttccctcttctggaacctgccctggctcaggcatgagggctgactgtcaccctttgataggagcccagcactaaagctcatgtgttggcagtgttcttgcgggaaggaaaaagaccagccagcccatttgttactgcacaagcaaacagcttctggtagctgtacagatacatgcactttctttcctcactgtgtttccatagacagatttagtgctgtagaagagtagagggcagtcacgggaaggagttcctgtttttcttttggctatgccaaatggggaaaaatcctcctatcttgtctttttagtgtcatcctctctccccttttcttcttctttataattctcatctctcatctctcctggaaatgtgcatgtcaagttcaaaagggcacaatgttttggtgaggaagaggtgggagaacacgtgccaggtgctaactagggtcatcatttcccccttcacagccagcttcctgtgaatgtgtgtgtgtgtgtgtgtgtgtgtgtgtgtgtgtgtgtgtgtatttcttttgccagcatcactgaatctgtctgctgtctggtattccaggttttggtttagggaaaagtaaaagtaattttataatcccagctgtcatttaagccacccctttgtgggtagcatatggtccactctctcagttcattgtcctaaagatgcttcatcagaaaggaataacttccaccccgttactctctgtccccttactctgctttatttttcttcgtcaatcctaccaccaccacccactgtttgaacaacccactattatttgtctgtttcccatccctggtagaataggagccccatgaatgaaggaactttgcttctgttgttcaccactgaatctctaaggtatggaacacacctggcatgtgataggcactcgataaatatttgttgtggctcatgggcaccttgcagagttaaggctgcagttgtttgtggaatttataagtggtaatgaatatttatctactattcctcttccaaggcgatcacacaataatcaggctttacactatccagttcttaggtcttccaagttatgacttgtgaggtatgttaattatgataatagaaggcagtttatttggttcagatttattgatgtgtaatttaccacagtaagacttcccctttacaaaagtatgatgagttttgacaaatggatacacatgtgtatctaccactgccatgctccttttcagtctgtcgtcccctccacccatgaccactggtcaccactgcagtgatttctgtccccttcatttcaccttttccagaatgtcatataaatggaatcatgcagtatgtagttttttgtgtctggcttatttttcttagcattaggcttttgggattcatccaggttgtcgcatgtaacagtagcttattcctttttatggctgagtaagtgtcccagttttatttatatatttatttatgaggaggtgtctcactctgtcacccaggctggagtgcggtagcgcgatctcagctcactgcaacctccgcctcccaggttcaagcaattctcctgcctcctgagtagctgggattacaggcacccaccgccacgcccaactaatttttatatttttagtagagatggggtttcaccatgttggccaggctgatctcaaactcttgacctcaggtgatccgcccacctctggctcccaaagtgctaggattacaggcatgagccactgtgcccagccccagttttatttattcaccagttgatggtcttttcgacaactaattgtttccagtttttggctattctgtataaggcttctataaatattcacaaatacctaggatgggatgactgggtcatataatagtactgtataaccttagcagaaactgtcaaactattttccaaagtggctcttccattttacaattccacagtgtattgagtcccagtgtctccatacacatgctagcacttttaatatttaatttagtgggtatgtaatgatatctcattgtggttttaatttgcatttctctgcagctaatgatgagtgtttctgcttatttgggaaggttttaatttagcagtctgttgtattctgtagatattaataacttcaaaatatcagtggcatttgcagttaaaatttccttaaaaaattggccaaaggtttccagcagtcacttctgccatgcccaaactgtatgaaacaaggctgaggtgtggagattgtcacattttggcaaggagtgatccacttgggtgactgatgagacccagagagcgtacgcctcgggcttgagggtgaggacgggcgggaagtcgactgcatggccctgctggccttgggaggctgcccagtccttagctaaagctggcagttatgggaaacagacttagattctattacgtttttcaggatgtcccaggagtcacctgggaagctcagcagtcctttgtgactttcaagcatatggtagaagctgctgaacacagagctccctctttggggataatttgcccaaatcatttaatcaggcttgagaaatgagttaccacaggtccaggagtgctgccacccttgaattctgacaccctatttctcctatccgtctcttaattaattaagcagacatccccaagtgcttacgacaagccaggacccttttgcatactaaggaaaacagggatgaaggaaacagaaatggtctctgctctgactcagaaggtagaaatcctctttcccagccaagtcttcctagggagcacgtaggaagggctctgaacccacgtgtcagttgcaggggaggatatcaggaaaggacattgaagaagtggagacctaagtttgagacctaggcattagccaggctagcagtgcttgaaaaagtgtcttaggacaagagaactcaccagtgaagtcccagtggtaggagagcgtgcagcatattctgagcctgtatacacatctccagggcattgcttagcaggtggggagtggcaagagagtaggctggagtcacagaagggaggccaggtagaccttggtgagcactggactctatgttcaggtgctgaggagctggcaaaaggttttaagtcggggagaggcatgttcagatatttggtctagctgagtaactttgggtgctctgtgacaaatggttgggagaccagtgaggtggcagttgcggtcatctaggagcaggatcagagtggcctattgactgggatgactgtgaagtgggatcctttccagccagtaactggaaatgtgtatgagggcagaagtgagtgtactgcatttgaaacattgagaaatctagtacatagtactgtctcttttatatcttttttttttttttttttgattttggtttgtttgttcactaacttggaaaactgatgtggaaatgtccctttggcttcagttacctgagcagaaggggccgggcattgccaaactctcctcttaggacagaattgctcccagtattgatcattgtgttctgagatgggggagcaaattgtgcaggaggccaggtcagtgccaaggtgggtgggaggaattggaggaggaagcttgcctaagtgtgcccagcaaagccacggtagaactttctactgtggctctatgctacttcttagcaaccttctccatgtgcttcctggagagtccttggagtcagaacctttttcttgaaacccagacactttacttccaagaaaatgctgtccaagaaaactcatccttcccttcttctcatgaacgttgtgtagaggtgtgtcttctcttcctttgagcttttccactcagggtttaggggaggtgatattctatatttgggtttggctctgggtactgcaacactaggctattaagatttcatccttactgctttgcccctcctatctttccagaaacccacaatggatttgctagaaataatggaacgtcctgtttggacaggatataaccatttctcagctagaggatattgttggaatgaagaaagataaatggggagaagggaactcacattgctttggcacttaaattaagccatgtactgtgttgggaaattatttatattatctcgttgaatccacagtagaacacagttgaacaccatacaaggtaagtattgtcatccttattttaccatgaggaaattgatgcttagagagcataaagccttggccaggggcacatagttgggaagccggggctaattcatgcctgggctctttctgatagttttccttttttaattgtcccctcctcattgttaccttggggatttcaagagattcatgtagcttctaaatcaacgaactgattcctggagagcagcttctgtatgagaaaaatctagctaattatttatttcagtgtctctggaatgcaagctctgtcctgagccacttagaaaacaatttgggatgacaagcatgtgtctcacaatgctgctctggttgccagtgctgtgctgccagttgtcatctttgaacaaactgatgcagtgctggtttaactcttcctctttttggagtaagaaactttggaggcctgtgtccttctagaagtttgctgagcaaatggtaaggaaaagaaataggtcctaaggcttgactatttcagagaatttcttgatttattggactgtcaatgaatgaattggaatacatagtggtaggctgtcttttcttctcagacactgcaatttcctccaatctcttgacttttctagaagttttaatccaagtccttgttgggtggtaagataaaagggtattgttctactagagactgaccttggcatggagatctcatttggactcacagatttctagtctagcgcttggttttgtatccatacctcgctactgcattcttagttccttctgctccttgttcctcatgcccagtgtcccaccctacccttgcccctactcctctagaggccacagtgattcactgagccatttcataagcacagctaggagagttcatggctaccaagtgccagcagggccgaattttcacctgtgtgtcctcccttccatttttcatcttctgccccctccccagctttaactttaatataactacttgggactattccagcattaaataagggtaactgctggatgggtggctgggatacacagaatgtagtatcccttgttcacgagaagaccttcttgccctagcatggcaaacagtcctccaaggaggcacctgtgacacccagcggagtaggggggcggtgtgttcaggtgcaggtggaacaaggccagaagtgtgcatatgtgctgaccgtgggagcttgtttgtcggtttcacagttgatgccctgagcctgccatagcagacttgtttctccatgggatgctgttttctttccagagacacagcgctagggttgtcctcattacctgagagccaggtgtcggtagcattttcttggtgtttactcacactcatctaaggcacgttgtggttttccagattaggaaactgctttattgatggtgcttttttttttttttttgagacagagtctcgctctgtcgccatgctggagtgtagtggcacaatcttggctcactgcacctccgcctgccgggttcagcgattctcctgcctcagcctcccaagtagctgggactacaggtgcctgccaccatgcccagctaatttttgtatttttagtagagacggggtttcaccgtattggctaggatggtctcgatttcttgacctcgtgatccgcctgcctcggcctcccaaagtgctgggattataggcttgagccaccacgcctggccgatggtgctttttatcatttgaaggactcagttgtataacccactgaaaattagtctgtaaggaagttcagggaatagtataagtcactccaggcttgaggcaaaatttacaaatgctgctgactttgtatgtaaggggaggcattttcttagagaagagaggtaggtctctgggattccagtatgccatttccatcctcagtgtttttggccacctgagagaggtctattttcagaaatgcattcttcattcccagatgataacatctatagaactaaaatgattaggaccataacacgtagctcctagcctgctgtcggaacacctcccgagtccctctttgtgggtgaacccagaggctgggagctggtgactcatgatccattgagaagcagtcatgatgcagagctgtgtgttggaggtctcagctgagagggctggattagcagtcctcattggtgtatggctttgcagcaataactgatggctgtttcccctcctgctttatctttcagttaatgaccagccacgggcgtccctgctgtgagctctggccgctgccttccagggctcccgagccacacgctgggcgtgctggctgagggaacatggcttgttggcctcagctgaggttgctgctgtggaagaacctcactttcagaagaagacaaacagtaagcttgggtttttcagcagcggggggttctctcattttttctttgtggttttgagttggggattggaggagggagggagggaaggaagctgtgttggttttcacacagggattgatggaatctggctcttatggacacaggactgtgtggtctggatatggcatgtggcttatcatagagggcagatttgcagccaggtagaaatagtagctttggtttgtgctactgcccaggcatgagttctgatccctaggacctggctccgaatcgcccctgagcaccccactttttccttttgctgcagccctgggagccacctggctctccaaaagcccctaatgggcccctgtatttctggaagctgtgggtgaagtgagttaatggccccactcttagagatcaatactgggtatcttggtgtcaatctggattctttccttcaggcctggaggaatataataactgagacttgttttatttctgcagagggttctaagccattcacttcccagatgggccaataatgctttgagtaatctggagatcatctttaatgcgcaggtgaatggaactcttccacagagggatgtgagggctgtagagcagagtgaactccctgaaactcagacgtcagctctttgtctctctatctctgaacacccttccttagagatcccatctctaggatgcatttctctgtagttagtttctaagtctcttgttcctgttctgcctttatttttttttcctggattctaagccagtatccccacttggctgtcttaatgtagcttaacatgtctgtaatcaaaatgatcatctttctgagattcaaagggctataagggactttggagagaatttcattcagttttcctcaaactagaataatgcttgcactgtctgtaaaagaacaaaagtgtcaaagcacccttttgttcactaaatttccttttttattatagtgttacttaaatattaggaagtaaaagtaggtataaacttctttataggctgttattatacaactatatgacccatacatatttacaaattaagtgcagccaaaattgcaaagtcataccattcaaattaataccttaaatgtggtgaggcagctgttgttcaactgaaaccaaattataagttgcatggcagtaaatgctatcatgctgatcattttgagtttggccagtctatattatcatgtgctaatgattgaattctccacccatttttctacttgtatgaccttaatttgatggcacctgttccatcctcatgagtttgctacaattatactggtgccaacgcaatcataaacacaaatataaacttgggctttgaaatcttgtgccagaacttggctttaaagtaagcatttaaaaaatccatatgtgtttattagactttgtttagatgactgttgaaatgaaaacaaagtgtttaaaatcctcttagagaacttaaatataatccctcagcaatatgtatacagatcttcctttgagaaaaactgattgtgttcagcctctcatgttacaaatggggaacctgaattctgaggtctctagtgagagaacagggactagaatctgtggatcctatctgttttaataataattgtaaagtataatagataatattatattaataaaataaaagcaaacacttagaatgagcttccatgtgtgaggcactaactgattaggcattattaactagatttattccttttaaggccccgcgatgtactgttatttccacatgttgtagctggggaacgtgctactcagagaggttaagtaacttgtctgaggtccacaccactaacaaggagcacaggtagggttcaaatccagataatctgactttggagctggcactctaactcaatgtgcctaatcgcttttcagtggtgtcattattttgcctattctccatctgagaatattgaagtttctgactccttccttgcctttctccctgcctcccgtggttatccccaggtcttggtgttccagtcctctatgtccgtccttactcttattcctttgctacagtgtgatccagggctcctgccccttcttatcctggtagagggggcccacttgctgggaaattgtctccgccatggtttatccatgttgtgtgtccattagtgagtagtgggaagaatcatatcatgttggcaatgaaaggggggctatggctctggggtagtctagtctgaacctcttattttacggatgagaaagctgaggtacaaagcagggaagggatttcttgaggtcacccagccagcaactgagctgcaaccagaagctgagatccccaggactagggccgagcctcattctgtcccatcacagtgacttttcttccctcctccaaactatttttattttttatttttttgcagctgcttagcagcttgaagttagaagaaagggcagggaaaaggttttccgtgcttagccagggaaggaatcctgcaacaggatgtggggttgggtcattcaaattgggccagactccactggtcttgttgcttcttgcttggtattgcagatgggtttaaaagtgttaggattagagagataggcaggtttagccaaaggcagtttgtagccttgtggcagagttctttttaaagaaggaagtgggatgcaacaccctgacacaaaggggcttaagttgttataccactgcctgctaacctgttttccttaactctcttcctgatttctaaaggaagtatattttgctgaatcagaaagaaaagtgatttatttcaagttgctgatgcttagattgttagagttgcaaagatctggcttgcatcttgtacaactgacagaactggggctcaggggggcacaggtgcccagagttggtcagtcaggaaagtagcaccagaaccagtctcctggtggccctacagttgcagacccttttttgctttgctctctgtgtatactaaagcttctatgtctctgaatctcaagttctgactggtagctactttccaatccacctggcttagatttctagattatattgtttagacgtcagaacctcttaagggttttggggccacttgttagctcacatagtgagaaccagccctgcccattaggtaggggaagaagttagcagtccatgatagctgttgcctgcagcatacggacgttcattgcgcagttcctgtctcctgagatcctggagtgtatacgcttggcctcagagcccagcacagagcctggcccttgggacatgcttagtaagtatttactgaatgagtgggaaatgtcttaaggcccattagtttgcaggtcttgaggaggctcccttgcactaggaagaatagaaagcatacataaagcctgtgtgctgctgccaggaagactagaaacgctatgttcagcctggagctgaatggtataccccagagcaaccctgttgaaaggcagtgcttgccttttcattctgtgtcctggtttgctggtaactcctgggtcccctgcctctcctgtacccccattgtgcagactgaggggggaccatcagccagggttagttttccgctgtttctgttaggcaaagaataaattgaattgagttgtgaaagttgggtgcaaagctcagtttgggtccaaagtaacagttaacttgtgtgggtggcaggtattcagtacaaacagggctggggacaggaaggggaagagaacttcagagctttcacgatcctcatctggttttaggctgatccagaggccaaggtccccatggaacaaactggacaaagtgagggtggccacatggcctcttttcttttgcctttattattaattttctcaaatagatctgactagtcatgtggctgggaaaatagttaattgtgatttttttttttttaaactgagtctcactctattgcccaggctggagtgcagtggtatgatctcagctcgccgcaacctctgcctcccgggatcaagcaattgtcatgcctcagcctcccgggtagctgggattatgggcacacagcaccacgcctggctaatttttgtatttttagtagagacatggttttagcatgttggccaggctggtcttgaactcctgacctcaagtgatccacccaccgcagcctcccaatctgctgggattacaggcatgagccactgcacccagccagagtaccactatttgggcattctttaatgaaaaagaatgaactatccaaaaattaaaactcctcatttatgagcttttagagaattttacagagtagatggaaactctctgcatcctttccccacttctactttcacctgacacatttcttccctgtccttactcctgggccggcagcagtggtcatgattccaatcccagcttggccaccatctgcctcagtggcctaggaaaactcctttctccagagctttagttttctcttctacggaatgaagaaagttaaaacaaatagacatttattgtttcatttggataaatatctattaagcatctattacttgtggtatggttagctgggtatatagtggtgaagcagctgggcatgagtactgctttcgtagagcttacagttcagtgaggccagcagatgtgaaacatatcatcacacaaataaaaatataactatcaactgtgatgaggattatgaaggaaaaaatccggcaaactatggtactggtgttagatactagcaggtgtgggtagggatttcatttagatttacaggtcgtcacattaaagctgagagccctgaagttcaagcaatggttagccaggcaaagatcagaggcctagagatagggaaatccattccaggcagagagactgggggtgcctgtcccctaggtcagggaacagaagaaagccagtggcactggtggagtgaataagactggcgggggatgagttggtagtagacatgaccagatcatttagggccaattctcctggggaaggagaatttaatttaatatttatttatttatttatttatttatttatttatttatttttcaagacggagtctagttctgtcgcccaggctggagtgcagtggacaaactcggctcactgcaacttttgcctcctggtttcaagcgattctcctgcctcagcctcctagtagctgggattacagacgcccaccaccatgcccagctaatttttgtatttttatagagatgcggtttcaccatattggccaggctggtctgaaactcctgaccttgtgatcctcctacctcggcttcccaaagtgctgggattacaggcgtgacccacagtgccccctgagaatttaattttattttatgtgcaagaggattccctgaggtagtcaggccacattgtctggtgactcttgggatagagggaacttgaatgacaaaggcccaagaaagcaattgtaatcattacatatacatggaccattttatgctgttttcttctttcatttaacattatttagtgtgcgtgttcacatatttctaaatcatcttctgatttagaataatgatttctgatgtgtaggctgtgttttatagttttgaaagtaatactttgatatccattactttcttgattctcacagcaattctgaggtgtatgcgttgcaatttctgtttcacagatgaagagagtattgttaataagttaatggccgggcatggtggctcacacctataattccagcactttgggagaccaaggtgggcggatcacttgaggccaggaatttgagaccagcctggtcaatgtggtgacacccatctctactaaaaatacaaaaattagccaggcgtggtagcacttgcctgtaatcccagctatttgggagggtgaggcaggagaatttgcttgaacctggcaggtggaagttgcagtgagccaagattgcaccactgtactcctgcctgggtgacagagcgagactctgtctcaaaaaataaaaagttgctaagaggagggctgggatcttttggctccaaatctactgtgggatgatgcctttgacattcctgatagctgtgcagtaatccattaacacagtttttataagttcaaaccctgttgccaacatttagattgttccatgtgtgctgttacaaataaattactataaagattctatacatttaatcttttattatttttgtattatttctgtaggccaaaatctgaggaacaggattactaggttgaagggaaatggcccttgaagtgtctgatcagatgtctttccagaggatccaaccaatttaaatagccaccatcaatgcatgagactttgtagttcagggaaggcaggcctggttttaaaaatcatttcccctctctagcatttttctgatgtgatccttaagatttcactttagttttcccaggtctcattggcatgtatgctgttagggatgggtctaaaattaatttttcttcacattcatatcatgtcatcccagtgattatttaataaataatcacttgattaaatagtgattccttttctagttatttttgggacatttattaaaacctggatatggtggctcatgcctgtattcccagcactttgggaggctgaggtggggggattgcttgagactaggagttcaacaccagcctgggcagcatagcaagactccatctctataaaaataaggaaattagtcaggcatggtgggtacttgcctggagtcccagctacttggaaggctgaggtaggagaattgcttgagtctaggtggtcagactgcagtgagctatgaccatactactggactccagcctgggcaacagagtgaaactctgtctgaaaaaaaaaaaaaaaaaaaaaaaagatgtgtagggagcaattttggagttattcatttggtcatttgatatgtagttttagttttggtgctgatagagcccagaatgtaccctgaatttgatgaacattctgatatatgggggagctcattgtcccccacttacctttttgcctctcagaatatcttttgatatttttatctgttttttccccattgaatgttattaccttatcaagctcaaaaaagtaccctatcgctattttaagttcagttgtgttaaatctataaattagcttgggaaatttggatattaaatgaactcatgaagaagcagagtttagctctccttaattctcatcttcctttatttatcctactacagttctgtggttttcttttatgtaagaagcacatgtttggctaagttaatgcctaggtttttttgtttatgtgtccattctcactgtggatagtattctcttttccccacattatattaatttaactggttttcagagactaatagcaatgctattatttaggagaatttaccttggttctgattaacttacccatacttgcaaatcatttgcagctttttagttaactttgtgagttctcttagatttatgaccatgccagaaacagaaaggatattttcatctcttcctttctgatgtttattcttcttgtttcctttttttatcccccattatattctcaagaatctctcaatactaagaaatagcgacttcatttttcagcgcagagtgcattattttggctaccatgattcagaagcctcttgcctaaggcccaattttattctgctagttttctctgttctttgtacatggcccttgcgctgccctaaccttgaattaacgtggctaaatctcaagaatttaagagcaccgtgactgtgtcctcaggctagggagggaaatgggttcacagagtgactggattgtggtctatgaacttcggcagccagcagcaaaagtcaggcatgaataatcaagtggacagtgaacatctgtagtgtgggagatgttggcataactatgaatgatgattcaagagtggtttgatgcatattgaataacatgatgataagtactagactctgtgctaagccttctatgtgaaatacatttaattctcataataactctagagcagtggttctcaaccggggccggttatccccctaccccaccccaccctcacccttccaccagggacataacatctggagatatttttggttgtcacaatcctgggaatgtatgtgctgatatttagaggttgaggtcagggatgctgctgaacttcgtagaattcataggagagtctctcacaacacctatctggccccaaatgtcagtagggtcactatcaagaaaatctgctctagcagtgcctgctcatattatccccatgttgaaatagcaagatgggaagtgcaaagtggtgcttcggtactcttggagcagctttgactttggtgagaaacgccttttaaaaacaatgtttcttcccatcttcccaccccatggggaggtgtggggttgggtgggtaggcaccaaagcaagatttagaagagttttctgtaggaatttataatggtaaaggatcaacttcatttccaagctatttatgagggtttatgtttaggaaaagtgctaagcttagagaaggaggagaaatctgattttattaatgagtgtagccataatggcatatcctggcagaagtcaactttggtttctagagggaggctattatgaaaagaaatacctggaacattcccctgggtttggaaggtgagttctaggttcaatgatgggaagaattttagaggtccaagataaaagggcaaagattaaattttgtctctcatgagttctctggctcaggtggtgtgaactttgcagacagtctctttaattcactcatacatgctagtctcccagctcagcaagggctttgagagagcaggtgtctgtatgctctggtaagtgaaggcaaagtgcataaggaggttggggtccataatggcgaagagaaggagcccttcagtcagagtggctttgaatcttggctctgccatttgccaatcttggaccattgggcagtgtattaactctttgaatctcagcttcctcttctgtaaaatgtgtataacaagagtactaattggattgtttgatgattaaatgagttaatgtgtataaagcactcacaaccctggtacatagtaagacctttcattattattatcatcatcaattttttttaacctcttttcctgatctgcttacactcaccagcttcagctgctccaaatggcttgtaagattttttgtttgccctttgctgtcagttgccatggggaagatccattcatttttttcagtcaaccaacatattttgagcatctgctgccctacaggatcctagatatgggggctgcagagatatccaggaacataagccttgattaattgggtcagatcagtgctcagcagggctggcaagtgctaggtttcttttaagtggcatatcttaaaaggtatatgtcctaaacatagctttgtgatggcagcatgatgggtacaaaagcacacacttaagtgtcagtagatctgggttcaaacattggtgcagtttcttatggctcgtaacttgttcaaacctcagtttcttcacttctaaaacggtaatgatacaacctacctcacagggttattatgaattaaatactggagatgagatacacaaaacgtcttgagtacacagtagctgcccaatattggctgtaagtattataaatctacaagctgtgaattaattttacctctgtggatcctgttgatatttctagaccattccacctagtggggccatttcctacctgagtcacccgtggtgtcaaatagaatgtcatgtggcctcctgagttgggtagaattggctgctcatctcaaccccgctactgactatctctgtgatttacccttcctccagccttagccttgctacatataaaatcaagacaataatgtttcctatctcacagggttgtcctgaggattaaattaagtaattaatataaaatgtgccttgtacatattgggccctaaataaacagtagctactatttatccttaaagtacaaatggtagtttcagagcttcaaggctgatggctatttatcttactcatactctttgtttagcttcatttttttcccctaatttcattagtattttcttttctttttttttttttttttttttttttttttttgaggtgaagtctcactctgttgcccaggctggagtgcaatggagcgatcttggctcaccccaacctctgtctcctgggttcaaacagttctcctgcctcagcctcccgagtagctgggattacaggctcccgccaccatgcccagctatttttttgtattttcagtagagatggggtttcacccttttgaccaggctggtcttgaactcctgacctcatgatcaacccacctcagcctcccaaagtgctgggattacaggtgtgagccaccacgcccggcctcataagtattttctaaatttatttacagtcatgccatttaaaaggaaagttgtattcctgtctttgttaatatttataagtgattttattcagctacaagcttggaatggcatataattttgtattctgcttttttcacttaatattacatggctaatgatttctgtgtttcataaacattattctgatgatggcatgatatattgttgagtacatgtaccataattgaatcatttccctattgctatgcaattaagttgtttccaatattttgcaattataatgtttcaatgaatgaataactttatgcatatagctttttgatatcttaagttcagtttcctaggatgaatttccaggaatagtaattgggcaaatgggataaacatgactcttgaatacgtattgttaacattgctttcccaaagggctcaactgatttatatttccgtgttcattatcttttaaaccagctcatttactcaccaaacatttttaaagccattatcatgtggtaggcttagtaagaagaaagtgaccctaagggagaagcttatatataaatagggtccctggtgtaccaagtgctgatacagacacaaagtacctggggaaattgagatgagggagtcctggctcagctgggagaaaagttcattttcatagagtcatggttttgttctttggcagaaagaaaattgctttcttccccacccccacccccagctttattgaggtataattgacaaataaaaattgtatatctttaagatatgcaatgtgatatatatgtatatctcaacttaaaaaataagctacagaataaaaaggtgtttgctattaaaaaaaaagaaaaggctgaatgtcattcccaagcttggaaatttgagtatgttgcctctttgggattatttacagaaatattagcaagaccagccccatctttggtcttgagtactccactgtcagcatgctttcttccagagagggatccatttgcctttatttttcattctgttgtgccgtctatgcaaactattcttgatagttttatggtaacagtgtttttttgttccatgagataatttatacatgctcattgtggaaaatttagaaaagacaggaaagtattaaaaacatcacttttttttttttttttttttttttttttttaagagacagagtcttgctctgtcgcccaggccggagtgcagtggcgtgatctcagctcacagcaacctccgcttcccaggtttaagtgattctcctgcctcagcctcccaagtagctgggagtacaggcatgcaccaccacgcccggctaattttgtatttttagtagagatggggtttcaccatgttggccaggctggtctcaaactcctgacctcaggtgatccgcctgccttggcctcgcaaagttctgggattataggcaggagccactgcgccagccacacctacgttcttatcatcctagtacatccactgtcattatcttgctgtatttccttctgcccagtctcactctgatcatgcagtggcgtgatcatgcagtgatctcggctcactgcaacctaggccttctgggttcgagtgattctcctgccttagcctcctgggttcaagtgattctcttgccttggcctcccaagtagctgggattacaggcatacacccccatgcccatctaatttttgtatttttagtagacacagcgtttcactaaaattttgtatttttagtagagatggggtttcaccatgttggccaggctggtctccaactcctgacctcaggtgatccgcctgccttggcctcacaaagtgattacaggcatgagccactgcatccatcgccaaaaagattttttaaaagagtttaatgtagaaccatatcaaaggtctttggaaataaaaaacagttttttaaaaatatcagaaataaaacaacaaataaataaataaataaaaaacccaaaacaatctgaagcacgagcacctagcagaaaggttcaattatgatctattcatagagtggaatatcaagtagacattacaggacatgttttaagattatattttatgtcatgggaaatgctctcccagtatgatgttaaatgaaaaaacagaatacaaaagtatatatgctgcatagtctcaatattgtagagaaaaaatattatttatgtatgcatgaaaaaagacaaaagatgttaacagagatccattgttacttcagtttactagggattgtctctgggaggtaggattaaggtgatttatatttacctttttaaacttttctgtatttttttattttcaaattttccataaaaatataaggacttgaagatcaagaaaaaatttctgctttggctcagtgcagtggctcacgcctgtaatcccagcagtttgggagccctaggggagaggatcacttgaacccaagagtttgacgttccagtgagctatgatctccggatcgtaccgcctggacgatggagcaagaccctgtctcaaaaaaaaaaatctttgctttttttttttgtttgtttttgagacggagtctctctctgttgccccagctggagtacagtggcacaatctcagctcaccgcaacctctgcctcctgggttcaagcgattctcttgcctcagcctcccaagtacctgggattccatgcacccaccactatgcccagctacttttttgtattttcagtagagacagggtttcaccatgttggccaggctggtctcgaattcctgacctcagctgatccaccggccttggcctcccaaagtgctgggattacaggcatgagccactgtgcccagcccaatcttttgctttttttaaaaaaagaagacaaaaagggattttataccagtattatcttggctgtgtgactctgaagccacagttgtaagttataattactctgaaacacaaggccctgtgactcttttgggctctttggtgtttatcttgattacaacgttggaatatagaaatgaaaggaatgggagaggtgatagacttcaggcagtgtaactagttgtctgaacactactggctcaattatattgtgtctagtgatttccatcttgtccgtcggctaatttatcgcctggtaactcactgaggcagggttttcctttggagaaacctcattgttttaaccagtgtatcatgcttgtttagaagttcaatgatctttttaactcatcggagaagatgatgaccagacctggacagatggggaaggactttgcactctctctttacagtcctgagtgcacacaggtcaatatggaactatgtgtgaattttcattgtctttgagagccctcttctctgccccatagggagcagctttgtgtgcaattagaggagcaagggttgtgtgtatttagcacagcaggttggcctggtcctctcctctcaacatagtcaccacatacctggcactatgctaaggctgggaatgcagacagatgggtgcctgctttcagagtgctcaatgtgctgaggaagccagcaacagaaacagatgatttcaggagctccaggaaaatgctacaggaggagtgtgcctgggttactggagtagcacaggaggagggcttctagctcaggctgagattttagtaaaggaaattatgccacgatgaatcctgaagaatgaatagaagtgaaccagataaagcacgataggaagcatcttcccttacctaagggaagacacagaggtatatggaatggtatgttaaaaggttgggactccaaacagttctgttaaagcttagagagtggtgggagagactggagaagttgattaattagtaaatgaagttgtctgtggatttcccagatcccagtggcattggatatccatattatttttaaatttacagtgttctatcttatttcccactcagtgtcagctgctgctggaagtggcctggcctctatttatcttcctgatcctgatctctgttcggctgagctacccaccctatgaacaacatgaatgtaagtaactgtggatgttgcctgagactcaccaatggcagggaaaatccaggcaattaacgtgggctaaattggacttttccaaagatgctgtctttgggaaacatcacacatgctttggatcagaaaacctaggcttctaatttgttgataaggcatgaactcaggagactgttttcagtcctagtgaatggtgataattgtaattataacagtagacaacatctcttttacacattttaaatcatgaaaatagaataaccttactgataattttagaaagtggtgattaaaagcacatttaagataatgccttaacacctagtcttttccatatgcatgatgtcttaatcacacattgcaaatcatggaacacagaattttaagcagcatttgtgtagaacttctcagttttactaatattattttattttattctcataacaaccttgaatagaactcagatcatctgtcaatcatgtattttgataacagcctttacagtgagcatagaaaatacagtagtggctaacaacacaggctccagatgtcaggttatctgggtatgaattctggtgtcagcattcactaagcatatgaccttggacaagtgatttaagtttcttttaaacagagaatagtaatacctacctcatattattattgtcagtgtatcatcttacaatcacagtctttctcttagggctgggctcagtgggtggattgacactgcagaaatggccagatctaaaggatcaacatttacgtagctgggaaatgtagctgggacttcagtttcactgcgctagtgatttttcctaccactaagcagctcagtccatacccctacgagacccacaagcttatgagatactgttcttccaggaaagcagtggggccagggccaccttttaattgtgtttcttggcctggtcccatctttctcacaatatatagcaacagttatttacttgctgattttctaatgcacatcacacatagtcatattaaacacacacacacacacacacacacacacacacccctcaagaaacattttctgagacgtgatttcctgatttcatcaaaaaagaaaagagcgggccaggcacagtgggaagtcaaggtgggtggatcacttgaggtcaggagtttgaaaccagcctggccaacacggtggaacctcgtctctactaaaaatacaaaaattagccaggcgtggtggcgcacacctgtaatcccagctactggggaggctgaggcaggagaattgcttcaacctgcgaggctgaggttgcagtgagccgagattgcgccattgcactccagcctgggcaacagagtgagactctgtctcaaaaaaaaaaaaaaaaaaaaaagcataaactgaaatttatatgcaatttatatgcctgtgagataattctgttttctcttttggaaccccaaagagatttttttgattgatgagcaaatacattttagattttatttaagcattatgccaagcaccactgaagtataagtttcaagggcaaactcagttttttcatctactagacgaatgattttctggaatgattacaagcaggcaagatggtgtagtggaaatagcaaatgtcttcggcatcagacaagttggggtttgtttgtatcctgcctctgcccttcaccgaggttgtgatcttgggcagattgttgagttttaacctagattcctctgactccagatcataaattttcagaaaagttctgaaattcttgtatatactgatggtaaatgagacttttccttacatctatgcacttctttgtttgtttgttttgagatggtcttgctctgttgcccagactggagtgcagtagtgcaatctccgctcactacaatgtctgcctcccaggttccagtgagcctcctgcctcagcctcccaaatagctgagactacaggcatgtgccaccacgtccggctaatttttgtatttttagtagagacagggttttgccatgttgaccacactggtctcgaactcctggcctcaggtgattcgcccgcctcagcctcccaaagtgctgggattacaggcatgagccaccatgcccggccatatccatgcacttcttgcaaccttaccttcttttctcatcaccctccagggacctagttggaagagcagagttaaaagttaaggtgaaacttggagaggtgtcttgtccctaggaacaaaggactggtttgaaattctctgtaaatcttccccagttcaaaccagagttatcaaggtcttaaaaacttccctgggtcctgagagcccattatattatttacttgtcttcctgtacacccactgcctagtcctgatcctacttttgtttgcaaataggatggggcacaacgtacaaggaagggcctttgccacccctgctaagggataacctgaaataccttcaccatcactgccctgtgctgcttttcacctatgccagtctgtctacagtgccagtgtctcctggcattgaaaggggagaatcttttggtcctttgagtatttggttgggttacataaatctccctgaatgaagagcagctgacttaggcaaggggccttgtttggttttccttgaactattaacaggaagatagggagattaactgtgtaaatgttcaataggccagagtccctgcagagggtggccacagtgatcagatcttatcacatccttgctttgggtgttgcctctctggttggagtatggatagaaaagaaagaaagaccctatattgaaatgcaaagtgcagcaagtcctgactttggattaacttctcagcccatttgcatgaaaataaaaagatgaataaaacaaggttcccactttggagggaggtggtagctgtgagatggaaggagtgttcctgctgggcaacagcagagtaagtgctggggtagattcactcccacagtgcctggaaaatcctcataggctcatttgttgagtctttgtcctacaccaggcactctgcaaaaacgctttgcctgcaaggtctcatgcgatgctcaccacagctctgtgaagttaattgtacttttatcaccattttacagatgagaaaactgagggtatggggtcaatgacttggctaaagtcactgcttagcaagctgcagggactggatgtgaattccaattggtttgactccaaagcctgtgaagctacttgttcttcaccacctagagctgtggttcttgataactgtgaactcttttggggtcacaaatagccctgagaatatgatagaagcaggagctctggcctttctgtccatacctgaacaggtccttgggttaagagcccctcgtccagggcctattaatcttgatcctcataagcagcatccatgtataaaggccgcaaaccaaactgtgccagaccgaatcctaggaccaagcccaaatatgtcccatcatccttttggtaagaagctcattgtaagaaagaaagaggagagcaagaggatgacctagtgcatggggcctcattgttttaattagtgacaaaacaacaataataacaacaaaacccccgaagcttcacagatgacatcagaccccaagcctgtgtgtttttcaggtgcccttgaggagctttgtagctggcagaggaggtgaaactgacaaatgtttggcagatggaggagagtaccagaggggtttgagatgagctaaattccaatctaaccgcaggtgtgaggaagaggcttggattgggaccatggagatgggggttctactcccagtcacgccagctgactttgcgagtgttctttgtcagtcactttatcttattttatttatttttatttttttgaaatggagtttcgctcttgtcgcccaggctggagtgaaatggcgcgatcttggctcactgcaacctccccctcctgagttcaagcgattctcctgcctcagcctccagagtacctgggattacaggcgcctgccaccaagcccatcgaatttttgtatgcttagtagagacagggtttcgccatgttggccagggtggtcttgaactcctgacctcaggtgatccgcccaccttggcctcccaaagtgctgggattacaggcgcgagccactgtgcccagcccacttcatcttaccgtagttacctccttagagtatgaaaaaataggcttagggcatccccaagtcccctctatgtctgagagctgaggctggctgtcaaagaggaactaaggatgccagggactttctgcttaggacccctctcatcacttctccaacgctggtatcatgaaccccattctacagatgatgtccactagattaagaatggcatgtgaggccaagtttccacctgagagtcagttttattcagaagagacaggtctctgggatgtggggaatgggacggacagacttggcatgaagcattgtataaatggagcctcaaaatcgcttcagggaattaatgtttctccctgtgtttttctactcctcgatttcaacaggccattttccaaataaagccatgccctctgcaggaacacttccttgggttcaggggattatctgtaatgccaacaacccctgtttccgttacccgactcctggggaggctcccggagttgttggaaactttaacaaatccatgtaagtatcagatcaggttttctttccaaacttgtcagttaatccttttccttcctttcttgtcctctggagaattttgaatggctggatttaagtgaagttgtttttgtaaatgcttgtgtgatagagtctgcagaatgagggaagggagaattttggagaatttggggtatttggggtatccatcacctcgagtatttatcatttctgtatgttgtgaacatttcaagtcctgtctgctagctattttggaatatactatatgttgttaatgatatcatgcagcagacgtgcatctgaatgggctggctctaggagctagagggtaggggctggcacaaagatgcatgctggaagggtccttgcccataagaagctgacagccaaggctaggggagttctgtcttctctgcatcaggtcacctctctcacctctgtcactgccccatcagactacaatgtctgcaggtctttctcccctgagtgtgagctccctgagcaaagcaggatgctgccccttccctttgtattcctggctcctggcttcagtgcctggacataagtatgggcataataagtgtcccccaaatgagacattgaggattcttcaaatgcacaggaccgtgatgtgagttaggacggagtaaggacgatgggatgtggctcaggacaatcctgaggaagctgcagctgcggcacgcagggccacactgtcatgttcatggaccctagactggctttgtagcctccatgggccccttccatacacaaatattaaaaattatatttcatgactgcattggtataaagatgaatataatccagaccagattcatgattattcatacatttttagtgtattaacttttaattctgcttttaaaataaattaaaacattctaatatgcccttaagagtatcccaggcccaggccactgagcctactgtggttcatggataagttggccctgggggcatgtgtgtgcatgcatgtgtgtgcacatgcatgatgagccgggccttgaagggtggtaagatttgggtgtgtagaccaatggagaaaggcatttggggcagtgatgatgggtgggggagggaacatggtgatgaatggagctgggtgtggggagccatgggagtgggttagggccagcctgtggaggacctgggagccaggctgagttctatgcacttggcagtcacttctgtaaagcagcagaggcagttggcctagctaaagcctttcgccttttcttgcaccctttacagtgtggctcgcctgttctcagatgctcggaggcttcttttatacagccagaaagacaccagcatgaaggacatgcgcaaagttctgagaacattacagcagatcaagaaatccagctcaagtaagtaaaaaccttctctgcatccgtttataattggaaattgacctgcaccagggaaagagagtagcccaggtgtctggggcttgttcccattagatcttccccaaggggtttttctccttggtggctggcctgtggggcccctctccaggaggcattggtgaagaaactaggggagctggttgccacagacagtgatgtactaatcttctctgggaagacagaagaaaagtccccagggaagaatactacagacttggccttagggacagctaggggtgcagattgctgccaactgcattttttctgaagttggccatatggttgcagtgaatggatttatagacagagtatttctgtgcatataagagcaattacagttgtaagttgatatggataagtgaaagttaagcacttctttctaaaaagagaatgcaattcattttcccctaatcatttcaattagtctgatgggcatttgaacttgttgtctttaaaaagtgaaatctttacctctgatctggtaagtatccaggcaatttcttgtgtgccacccaggaggtatctggggagtgggcattttctgactgaggcattggctgccatagcatcagagcagccttccaggcagtggcctggcaaggggacagaggctggtgggagcagctggctgagtgcagccagtaatggcatgtgcatggtctgtagagaatgtagaagcaataatgaagccgataaaagctggtctgcattttattattatcatgcgccggtggttctaaacaatgtcagtgataaattactcctccccatcatggaccaatggctgccactgctccagggaagtgctttttattccgtttggtgtttagggagggatggagttggctggcctttgctgaaaggcctaccagtttgttttctatttggcaaaagaagaaatgataaagttctagagtttaaaccagactcagatttgagttttttttttttttttttttttttttttttttttttttttttttttaaaggctacaaaactgtgctttccttgggcagtaaaagaggcaatgggcaatgggggacctgatgacaaagggaagcaaagctgtcttaggggtggcatggaggaggtgctgcttcacagcagagagaggtatggctgtgcttggagtgtccacttagacaactcctggctgtgcagccaggccatcgagatgctgtttccttgacctgcaggtcctggtcttgcacatggatgtttcttctggtgcaggagacagaaaggtagcaacaacccctgatcaaagcctcagtccttccttatttactggagagcccctgctgattgaccagaggcacagctggggatatttcctttacctctgtagcaagagacagcgtggtgcagaggaaagtgctagcatacattaccctgtggctgcatgactttgtgaataggttagttagcaccctttcagccacttcttcttacctgttaatgagataaaacatgtaattgcttaaaaacagtatttggcacataggaagcacttagtgaatatgaattatgattttttttggagtggtgacatctcaaccaagccatttaacccctcagccttactttcctcaactataaaatagcagctaacttgaaatgtaaactataaaacctaatgtagtatctggcacatagtagattcccaataaatgagagccagtattctttctaagacagtgatgcatttctgagcacctggccttgttcttctgccttgcaatttatgcagcagttgaaatagactggctgatgggggtaagttgtcaagcagactttctgatcttagtggaggagactgccttaaaacaacactaatttcctttttcttttcttttcttttcttttaagacagagcctcgctctgtcaccaggctggagtgcagtggcgcagtcttggctcactgcagcctctgcctcctgggttcaagcgattctcctgcctcagcctcctgagtagctgggactataggcatgctccaccatgcccaactaatttttgtatttttagtagagatgagatttcaccatgttggccaggatggtctcgatctcctaacctcgtgatctgcccgcctaggccttccaaagtgctgggattacaggcatgagccaccatgcctggccttctttgagaagctggagacatgagttaagtggtgaagaagccaaatctgtatctaaaaaccctacagtagtgtgcagagctctgaggagagaaggtcccttagattttgagtgtattattatgtcagtgcttgttttacatctctctgttcacgcagtatgtccccttttctgccttgcagctgtttcttaaattctttctttctttgcttgtcttgcagcacaaaacaggcttcagtatagggggaaatgcacagaaacactgccttttcctacaggaaatcagtaactttttactgattttgtttttatttacttattttatttgtttaaatttatttttagttttttttttttttagagacagggtctctttctgttacccaggctagagtgcagtggtgcccttagagctcactgagctcactgcagcctcgaattcctgggctcaagtgatcctcctgccttagcctcccgaagggctgggatgacaggcatgagccactgcacctggccaactttttgctgattgcgaatagcactcttgtcaatttcggagagaagctgagactggcatatgtcagtatggatccccacttagagacctgtgtttatctgcactgacaccccatcacagcatgatgagcttggccctcctgtgctgtctctcccagggctgggaggatccttgaagctgatctggtttggagctttgtcctcattcacctcctttaccacacacccaccttcccagggcggggatctaccactcactaagtagcccattctgggtgttgacagctctaattgttagaaaatattcaccaccctgttatgctttctagagaacaagtctaattctgttttccttgaaatagtcgaagacagctctcatgtttttctttccctgttttcccaaagtccatgattttttaggcaaaatggcctcctttcctcttatggaatgtttttcctccccatttctgcctctcctctggttgtgtttcagtatgtctgtgtgcttcttgaagtttactggaaattatgaaagtattctggcacagaggaggaagggatttttgcctcccttgttctgagtgctacatttccgttaatgcagtctgagattgtattaggcattttggcattcacgtcaccttgttgactcatattccatgtgcactcaaacaaaattgtgattattttaaataggcagaattgcaagttacgtgttctccatttctttgttgtattgttggctttttgaactaaagggaaaaatgtcttttttctgttttacatgtttagattccctatgctatcctatcctcccaaaaccattttagattctgattttgccatgtattatatctgatactcctttctcgtcatctagagatgtgataaacaactctctttggcctcattccagtcatcgataactgtgggacaaagacttgaagcttggatcagtccagtggagactaaccacccctgtagacccttttttcctcaactataaaatagcagctaacttgaaatgtaaactataaaacctaatgtagtatctggcacatagtagattcccaataaatgagagccagtattcttctaagacagtgatgcatttctgagcacctggccttgttcttctgccttgcaatttatgcagcagttgaaatagactggctgatgggggtaagttgtcaagcagactttctgatcttagtggaggagactgccttaaaacaccactaatttcctttttcttttcttttctttcttttttttttttaagacagagcctcgctctgtcaccaggctggagtgcagtggcgcaatcttggctcactgcagcctctgcctcctgggttcaagtgattcttgattctgtagacactaccactcaggcctatattgtaatcagtgctgggccactgggctcctgcttctgtgatccagttgggaagtttatcttgttcttcccttcagcttgcatctgctaaattcgctggactatacacaggtgatttgtagatatggggatctctactcaaatactctcatgatttccttggctagagcatcattttatttccacttattggaagagaccttagagaccagttagttcatttatagataaattagttgattctgtcattcaacccttatatattgagcgtctcctatatgcgaatcactgttctaagtgccgagacacagaggtgtccaaaacaaatatggcccctctccatatggaatttctattctagagaagaatctgacccagaagggggaagtgactgtcccaagtctacacaaccacagaagggatattctgggaataaatcacggctaaacccccctgctgctccaggcagttctccttctacagtgctctattgtgctgttttaataatctttcaactgggaagaactcccatttcaggaattaagccgtggacaaatcttttaattatccttgaaatcatcctaataagaaatccaaggaggaagtcttacagggtgcctcacccacttttctcatcactggaactttttagacattttattattttcttcctaaaccagagtacaggcacacaagttgagtggtgtggtggctaaattaattaatgtttgcaaggcagtgtgagaagcattcattcatcttaaatacctatggtgactgcaactcagatgtaaaaattggataaatcctcagaaaccctagggaaagtgacatgtctgtattttgtctctgtgagatacagactggcagagataagtgtttctctgggtgagttttgtgtggtatctgggatgattttaggcagtacgtggatgagaacttttaattttaacccacatccaattgcaatttcatggaaattattgcttaggaggatgttcaacaggaaaaatataattaaagttaattcaaaagaaacattttctgtgaatatggtaaaacttgtgagagtagtttgtaaatgattgaagattggaaaacattggtataagagtgagtgtggggttttgtattaagattcattttgggaagaaatccatgctgcatccctcatgaagtgtgaactttgggcatgtgttgattctttctggcccagagtttacctgaagattagctgccctgagggtcactgagcattaaattagatgatgtctgtggatgactgatagtgaagctcatagcccacagttgacacataataaattcgagttgctttgcttccccttctgttcctggctgactgtttggcctttgccacttgttcggcctctctgggccttaagtttctttgccttgaaattggaactttctttggtgaaacaaccagaaaatgcttcagcccagaaacttggtcagtacttggatgggggatcacctgggactacccaaggatgtgggctgtctgctagactatagccccttgagggcaaggtgggcgccttgctcatggttccatcctaagccccagcacagtagtgggtgcatggtgagccattagtgaatctttgtggaatgaaggtgggagaaaataaaatacctgtacttcacagggtattgtgagggtcaagtaaaagtgctttaaaaaattgtattatatagtttattcccttgtgttagcccaggtcaacagagcctacgaataataatgatgacagaagttcttcaaaaagtcttggccttctttctttcacaaaattgccccccagagctttctggaagggcagccatgaacccagaggcctaaagtagatttactgggaagctaaaaatatttactttatttttcatagctcctttcaaggtcctctctgggggtcttagcaatatgtttacacagtggtatgtttttgtaaggtttgcaaaagtaagattttttaaaaatactatcttgttttaaaaagagagccccctaccaacttgtgtcagcctcaggcccccacctgcatctgctcctgccagggcatggtggggcaagaagcactgctccccttccaaagcttccttccttgccctggagtcatcctcactccccactccaagccacctgccatcgctgtgccccctctctggtgaatctggcattcttaggtgggctgagaagcagactggcccaagctaaggcctttctgatggggttgttgctgctgagaatcatgactgggtgggagaaggaggtgaccctttgctgtcttatttttactgtgtatttccttttcagctacttaaaatgtattgcttagtgatacctaatgggttcattagcctgcttcctactgaacatttccgctcaggcatccacttggtcccaaggcctgctcctctcccatattctgaaatctggactacagactctcattcaactccaggttgcactgtggacacagtcccctcttgagcaggtacctccttgcagtggttgggacgtcctacttggctcatagttgggaagtgcatatgctggagctgaagcctcttgccttcccgggatagggcgtcctcacatcccctctgagaagttccccagcttccctctgttccccgtttccacacttagcgaggctcttgtccactgctacatcccccatagccagtccctcagccttgccattgcttatgctggtctggaaacaattcctagacttgtggggcatctggggaagttctccatctttttttagctggcatgacccaagtggtgtgggcagggctgtggattctatggtgtggctggaagccaggtagcctctctctactgtacatggaactcagcaacttctgagtcaagcaagatcttagctctgcaggtgtcttgccctgtccaaagttatggccacaccagtaccttttaactctagaagcccagtaagtgttttgtgggaccgcaaagatcattttctagacctgctgaatatgcctagaacgggtagggatggctttcacgctgttcctagggctgacaagtcacacgtttctgggggtacatacacaccgcggtccctgtgaatggcactctccatgagaactgtgatgatttgagttgaatagtgcacagcctacatggttctctgccatggcctggagttccttatcttgccttctccagtgaggactagggctgcaactggcctactttggctcctgacttgggggattctgaaataccttttttttttaaggttgtggagctctctgaagcttataaggattttgccaggaaaagataagaaatatctttgggcattttgtcactgtgctggagatgaaccctttggaggacatatcaccttgttgaggtcaaggggcggaaagggacaggactggcagagagatccggggcagcagcctgccatcccgactgagtatggagtttctctctcccttcagctgcacttttgtgtggagtcagtggctcagctgccacttcccttatgttcatggcatgaatctggcttgttaggcctttcttttttttttttttttttgagatggagtctcactctgttgcccaggatggagtgcatggagtgtagtggtgtgatctcggctcactgcgaccaccgcctcctggattcaagcgattctcctgcctcagcctcctgagaagctgggattacaggcgcatgccacaacaccctgctaattttttaatttttatttatttattttttttcaaggcagaagaatttttcttagtacagaacaaaatggaatctcctatgtctacttctttctacacagacacagcaacaatctgatttctctatcttttccccacatttcccccttttctattcgacaaaactgccattgtcatcatggcccattctcaatgagctgctgggtacacctcccagatggggcggcggccgggtagaggggctcctcacttcccagaaggggcggccgggcagaggcgccccccacctcccggacggggcggctggccgggcgggggctgccccccacctccctcccggacggggtggctggccgggcgggggctggcccccacctccctcccggacggggcggctggccgggcgggggctgccccccacctccctcccggacggggcggctggctgccctgctaatttttgtattttcagtagagatggggttttaccatgttggtcaggctggtctcgaactcctgacctgttgatccacctgcctcagcctcccaaagtgttgagattacaggcatgagccactgcgcccggctctgtttttttgtttgtttgtttgtttttgtttttgttttgagacggagtcttactctgttgcccaggctggagtgagtggagcggcacgatcttggttcactgcaacctctgcctcccgggttcaaacaattcttcctgcctcagcctcccgaatagctgggattacaggcacttaccaccaggcctggctaatttttgtattttttagtagagacggggttttgccatgttggccatttgaactcctgaccatctttgaactcctgaccatgtttgccatgttgaactcttgacttcaggtgcgttggcctcccaaagtgctgggattacaggtgtgagccaccatgcccagcctgtttggcctttctgatatggctctgactaatctttttggaaattagtccccagggttatactggattttacttagggaaaagggtcatgcctctctggctgtcagatttactgatagtactaaggactcagtggggtggacctttgattctggtttgatttttgaaaatcaaaaagacgtgagctccagggagcagggtggctttggtgacatggcaagatagttggctgtggcagggagttgagggaagtgggtagaaaattaacatcttgtaaatattccctgggaaatataccttcgtgttaagagaacagacttggcagccagatggcctaggttcaaatcttggcttgatgcttatcagctgtgtaaccttggataattccatacatctctgtgcctcagtttcctcaaatggaataacaatagtacctccctcaggactattgtggcaaattaatggacgaataaggggaagcacttagtacagtgcctggcccagcataggtaccaggcttgttcttaagctcactgcatttttacaatcatcataaaatgcaggggatacacacatgaaggagccgaagttcagagaggccaagtaacttgcctaagaaagcacagctggcaaggggcagtaataggaccagaattccagtttctcgtgctctgttgttgttatatcctaaagagagcagctctgagtagccagaagcttccctaaagtcacaggacatggggcatgggctggctgggatgagaaaggagacaagagggcttctgaaagaaatgccagattcactccacttcctggcttcaggcaccgatggaatgtttcccaaggcccatctagaaagaacatcctgtgactcacagccacttctcattttctgtctgaaccccctcacccattcaggcagctgctaaagttgaggttacagcctcagactatattttctgtccttgtggaaccccagtgtgtcatcttgttgggagatctggtgatacatgtgtcaacattatgtcatcaaaatggaaattctttgaaatctttaggtgattgcaattcacgttctgtatgtatgcacttgtcaaaagttttgatttgaggccttagaattttatatttggaaacctttccactaccatgagttttcccagacctgtcaaagccaggctgcatctcagaaaccaggtctttgatttccatccagggcaagggcctgggcccagctgggctgtaagcaggtgggggtggggagcaacgctgcactgcaatgttgaaatattacttgaactaaatcaaatcaaagatcagctttactcagacaagaatagaaaacacaattgcattcgattacagaatagtgtgtatccccacaaatatcagactgcctttaaaaagttttgaattgttaacatcaagaacagtgttgcgtgtctcctgcttttccagcataaggtttatttattctgtgggtggcaaagagcaatttgggagtccagtttgtttctcattgaaagctttcccatttctggtcctcttgtcactgttgcattgaggcaccaaaaggcaatctcaatgcgacactattcaacagactaagttgcaccggataatgataccattttacatttttcatatattattacattgaaggcttcaaacagcactagcaggggcaaattggtattattatctccatttcattgatgaggaaaccgaggctcgaaagggtaatgtctgttgtccaagattaaagagtaaagttgtacgttgaatcggggtctgactcctaggcttagcattttctccccacactatgctgccatgttgcttattccaacattaggaagcataggtgccatccccagcttttgaggccaatatcacgatgaagcatttttaaaacatctcattaaattgctgatatagtggaaagaaccaaagctttgcagtcaaagctgtttgggttcaaatttaccacttgtttgttctatgaccctgagcaagatattctccagatctgtttcctcatttgaaaaatgggaataataatacgtttctttataggctgttcttaaagattctggaaaataatgctaatagtgtgcctaatgcttggtaaatatgagtcacttttctgtgcccacaaagcactactatgtcccttaataaattttgttaattttaaaagttagaaaaaaattaaactatttatacattgtgtatgttaattcttccctagaccagccttaggaagaatctcatccccaacttgtaaactcatctttttccgttctttttgtgcctggacttctcagggccctgcaggctgattctagtcccatgttgtgtggtgtttgaagtgtctggtcccttttttcagtgagagaccagctcatccttgggaactgaatgcctcaaactctcttttctttttctctcttccccttctgtttgatgtagtctttcctgtttctggactctgtttcttcatacttcctatctcttaccttcttttcactccttttgtcttccagctgtcctctctcatttttctgcctctctggtcttcaggtagagttttcatctcagctatcttcttgctttttctgatgttggttctttgtttcttcttctcattctgttcaggtccaaaattcatttgggtcaatgttatgtcttagtgttatcttccatttccttctgagcttcaaagccaggctgactgtgcccttccacgccctggccagtgtgaccaggacatcctttccctctggggctgcactggctctttgggggaattgttaccattcagggtcttcaaccctcattctagggacttccagtaacttctcccaccttccctcttctcagtaagacatgggtattgtcttattctgtttctgctgctagaagaaaattctcgagactgagtaatttatacacaatagaaatttacttctcacagttctggaggctgggaaatccaaaatcaaggtgttggcaggtttggtgtctggtgagggctgctctctgcttctaagatggtgccttgttgctgcatccttaggaggggacaaacgccatttcctcaactggcagaagggactgaagcctctccctcaagcccttttataggggtcctcattgtcaggcctctaagcccaagccaagccatcgcatcccctgtgacttgcacatatacgcccagatggcctgaagtaactgaagaatcacaaaagaagtgaaaaggccctgcctcgccttaactgatgacgttccaccattgtgatttgttcctgccccaccttaactgagtgattaaccctgtgaatttccttctcctggctcagaagctcccccactgagcaccttgtgaccccctgcccctgcccaccagagaacaaccccctttgactgtaattttccattaccttcccaaatcctataaaacggccccacccctatctccctttgctgactctcttttcggactcagcccacctgcagccaggtgaaaaaaacagctttattgctcacacaaagcctgtttggtggtctcttcacacagacgcacatgaaactcatggtatctgtgaggggccctaatgctattggtgagggcactgctcacataacttaatcaccccttaaaggccctgcctcttaatactgtcacattggtgatgaagtttcaatgtatgaactttgaggggggacacgttcaaatcatagcaggtgtgctattgccttactagcaaagtaatctgggggaagatgagtaatgtctcgttccacccctgattccagtgctgactgattctggagtggcagagagggttggaggctcaccgctctgctcacccgaccctctggccatctcctcttagaatgcaagggcagggattttgttacacagcgcctcttttgttataggctagctcctgccttcaaggagcactgagaaaaatattatccctttgaaccacaacactagtattttgggtactgtagccattcagaagtttgttgaactaatacaagtttatattatttgtaaaatactagaaggaatgtgtggttcctaaagttatggtattcccattggttgaaagagaagactctggcttcctaatgccttggaaggttcagggagcataagcctaaatatcctggtttctcttgggaattcttcacagcttgtcatctatgactttatccacatttattttgaacatgtttaattttcagcttgtattttctcaaggagtatgtgtgagtcagcattcagagtacttaacacacttagtgtcattagtgataacttaacccacacgtataggaagctagacctccatttacagaaaaatggaggctcagagagcctaactgactttcccaaggccacataactggaaaattctggaactgagttttttcaggtatgtcttggtatccctcggtgagccttctctgtagagaaggaagtgtctcctgggttggaaagcccaggccgggatgaacagcatgggtgtccttaggctgtgtgtaccacacacccctggcctactctcccctgctctaaggagtcacctgaaggagcagctgcatcaccccgcctcaccccttctcctcagcacccaacaaccaggtcttcccagagagtgctcagctattggtgaagcaggcatcgtctattcttcaagaagacagcagagcatcaggaaaacaaaacaccaaaaaaataccataaagacactggagtgtatttgttaccagcccttgtataacagagaagtatttcaaggtcttatttgtaaggctggacaagctcaggctgattaaaaccacgagttagaatttgtctcccgctcccaggccctgctcagttgacagctcctagcaggctgggaggccccaccccacccccaccccaggggtccattgaagaagaccatctgggcctgggatgctgatgtgattttccctacttctccttttttttcatttgcctcctccacccacttctaaagcagctgattgctctggttccttttcatgttgagcaaaagagaagacagatcttgaaacctgagctggggactggagggcactgaccgagagtaaccccgtctggctcagctcagctcagcaaagggctttcctcctccgccttcctgagctgctctccctcctctcctttcctccttctttcccagcctcccccaagctccttcacccctctcttccctctcctccctcctcccaccttccttgtcctctatgctcagagaactgaaggaacactgaatggcctggaaagcaggacctcgcccccaccccgcgtcatacccctccgcctgcacgtgcaaatgtgttcctcagcttggtcccagaggcctggacctgggtcccagaggtcccagctggttccccggcttggtcccagaggcctggatgtgtggcaagaagctgagggttctgcttcgtttcttccagcccacaaacacacatgtcacctgttttttgttctttttcctttcctttgccccactttacagaagctcttggctaattggtaggtcactgtttgctcctccaggcaaaaccaaggaggctgagctcagcaggtcaagtattttggtctgtattgaagagactgtggtgggagagccctcttgaccttctgctggatagtgactttctcttctgctggcagcagtagcccagctccgcatcctgtgacagaggtcataccttccagttacccgagcgaacacttggagcaagtcagctttttcccctgaaacagcacgttcacgttcttgatctttggtttgcacaacaacctgtgaatgttattagccccgttttttttgtttgtttgttttttgagacagagtgtcgctcttgttgcccaggctggattgcaatggcgtgatctcggctcactgcaacctctgcctccaagcaattctcctgcctcagcttcctgagtagctgggattacaggcatgcgccaccacacccggctaattttgtatttttagtagagacggggtttcttcatgttggtcaggctggtctcgaacttccgacctcagttgatccacccgtcttggcctcccaaagtgctgtattagccccattttatatccaaggaaactgaggcttagggagatttaaataggggggaaagtatagcttcatgattacacagtcaggaaatggcagagctgactcttgaattcagaccctgtgatgctgtatccagtgctgattttgttttgccctgtgttcctttcagtgtcaggtaagaagacctcagagatcatcttctccaacccacacattttactgattataaaatccaggtccgcattaactcattggccaaagttaagtggctaaatgactctcctgttcaggaagtattccctgtcttgtgtggaatgattggtctttcgtccaggtcatcttccacctatatccatccttgcagtgactggtggatatgatcattcctggtgattccctgtaaaatactagatttatttattctttcataaagttatgagtagacaaatcagtcagcttcaacctttcctttaccttatagatagtatcagcagaaagaactcaataattctgtcttaggaactcagccaggctaatatgtattataatacacacatacatatgcacacacatacacacatgtgcataccttagatcacaaattcaacatctcaacttagccgccaaagccacttctgtgtcttgtctattctgaatatgctttaaggttaaattagccatgaatctgttcagatcagtcattcctgaaaatgatgatgatattagccatcctttaccgggcaccttactcagtgcccggcattatactaggtctgcaggtacatttgctcatttaacacctagctcagtccaatgaggtggatgccattgtcatctccattttatcatttaatcaactcagccttcctctctcctgttccccactctgcttctagctgccactcacctgactctcctcttgatctgggctgacgtggctgagtgggtttagcagaactcttgtgtcctctttacttggtttgtttcaagttcatgtcctgcttcatcttttccctaactcactgcaaggtgaattttcttctctgcaatcggcaattccccaaatcacatcaggtcattaatttattcactcatttgtattcattcattcattagttcatccatccatctattcattcattcatccaatttactgagtgcctcctctgtgccaggcactgctggctttggaattaaaaaccctggccctcaaggaatttctattcttctgggagcaggatatttacatgggtgactgcagcttgatctgtgtggtactagtggaaaacataggatgttgggcacaaaagagtcacaaaacgccgggcgcggtggctcatgcctctaatcctagcactttgggaggccaaggcgagtggatcacctgaggtcaggagttcaagaccagcctggccaacatgatgaaaccccaactctactaaaaatacaaaaaggaataatagctgggcgtgatggcgggtgcctgtaatcccaacaactcgggaggctgaggcaggagaattgcttgaacctggggctttggaggttgcaatgagccaagagcgggccacttcactccagcctgggtgaaagggtgaaactctgtattaaaaaaaaaaaaagtcacaaaaaagggctggccacctaacccagcttgaggatgggaaggccagggcaggcttcctggaggaggtgactcatgggccatgtcatgaggatggggtaagaggagaaggtatgtttcagacatctggctttcttaatattcttggctttccacccattttcctgccagcaacataggggagaagactgagaccagcagatacaaagccactgtactctgtcctcaccccctccttttttctccccttcctactacccagatctgaggttttgagaaatctcttctctaattatctgcttgttcattcatttgttgagaatctactatgtgcatagcattatgaccacaaaatgtcctggtcgttgtcatcatgagaggtcttaccccttcctctccagccacttctagggatttttgactctgtccttttccagaacttggctccagtctggttgctcgccatgaagcacttacagataaacctcatcttgggccagtgcttccatttactgtctccttttggcttgcttatccttccttctgccttcttgaattgatttgcctctttatctctcctttcagccttgaaagttcctcgaaggcagggactgtgtccccatcttttctataaatggcattgttgtacattggtaaagttgagtgaaaaaatctttttgataatcacaaattattaccatatattgagcacctaccatgatgagtatctctgatcttcatatctttgaaatgtggatactattaccttcacttaattggtaagaaaatttgtgctcagggaggtaaagtcactttctcacagtcacacagctatttcacaggagagtgcagtatcaaatttaggtttttctggtcccaaaccctgatgtttcccccacatcattgtttctcagacttggctgcaatcacctgaaaaattttattaaattcttttttttttttttttgagacagagtctcgctctgtcacccaggctggagtgcaatggtgccatctctgctcagtgcaaccactgcctcccacgttcaagtgatcctcctgcttcagcctcccaagtagctgggattacaggcacccaccaccacactcagctaattttgatatgtttagtagagactgggtttcaccaggctgatctcaaactcctgacctcaagtgatctgcccacctcacccagccaggttttattaaattctgatgcctgggtcttaccctagcagttctcattagttgctccatggtgtggcctgggctttgggatttttgtgaagcccccagctgagtctaacgggcagtcatgtttgagaaccagtatactacaccatgttgccttcctgttttcacacaggttggtgctagtgtgtgagtctaagcctacatgggtggatatccacgtgatcaggctgcaagttctttgtagtggaggatctttggccctccctgctgcttcccaacccagcgaacctaccacaccatgcacgtgcacagccaagggttgttgactgtttaatcagtctctgggttcttatgtctcatccgggggattcactgataggaggctggagcttgatcacatccagatgttctcatcttcagagcctgttaacataacagaagtcttataaacatgctgagcacactcactggtctggagagtgttgcaggatgacctaggcccattgcaggggtggcctgggtcgccctcccacacttctgccaccctgcttgggaaggagggagctgttttgaagttccctggtgcaatatgatgtattgctctggctctgctcaggaggaagctatggcccacctagtcagtgagggttagctaatacgtgtattctgtttctgttgaggtttcacagaggccttttttgacccttcattttatagataaggcagtggaggcacaactacatgaaatgactcgacaaataaatggatttagaacccaggtttctgactcccagggtggtgctttttccatggttgtacagtgattaatgtctaccttttcacaccagtcctcaactgaagacaccagcttacaccttccttcctgtttctcccaagaacagaaagtgaccccggatgtcgctttctgttcctgggaaggcagttccagtggttagaagtcctgttcactcctggggtgtggcctggggatggtcctgacatccctgggctcttcctggacctggccagctaaaaggaaatctcctatgatggtactcagatacttttggaaccttgtcagccctaatcccatctcctagtgtttagtattcagctacccttcactgggcagtaattctgtgccaggcctgatctgggcattggtggtactaagaacgcatattccctatcctataggcatagtctggtagagacaacatgcaagtaaaacaatgttccttaaactgtggttccacacctccctcccccaacattaaaagtgtaagggatgcttattcaaatgtagatttgtaggctctgcactctagacccactatttcagaatctctggggactgggcccaagaaactgcattttcgcatgctccctaaatgaagcttaggtgctctgaggtttgacaactgcagtagagagcctaatgctaacagtgtagagtcacatgtgatgggaagcatcaggtaggtagcagtttgcaggagcactgattctgagggacactaactgggcctaagaacagctactggctgtcatgaggaataactaggagctagccatagaggggtagcagtgaatcatttctctagcgatgtaaatcttgctcaatttattctgtctatataactcaatattactgaagtttgcctaaagcagaatacacctggatcatacagcatttatgagagactggctgggctgtcaggccctcctgttactttatctctgcatgtgaccctcttagctccgcggattaactcctgtcctcattaagcctcacactgtagccccattttcagatcaaacctgtttctcttctggtaaatgatttcagtttgcaaagtttgccctctagaggttgcttagtgcctggccatgtgggctcagttcatgtggtcctgatgagctggttttatctttattacaaagaagttaggctgttaggagagtgggttggaaggagaagaggtagacagccaaatgagatgagtcagggaaaactatactgtttcggagtcatagggctcctaccaagcatctggtcagaaacctctcattttggagatcaagaaattgaggttcagaaagatgacatgaggtacgcagggacgccaccagacacagcctccaactctagaaactaaaattctggattcttagtgctgctttttctgttttgttgcactggattgaagccttttctaactgtactcagagggcctattatttagggagattccgtatgaaatcctttagcaatcaaatcatttaatagggctgatggtttaaatatatgttaatgtgttttcctaaagcctggcagacctgggttttggagctttgtatcacatgttttatgtttggaatgaaaatgagaccatgtctgtgaaggcactttgatatgcgtaatgcactctgccagtgtttgtcaaaacatggtccccaggtcagcagcatcagcatcacctgtaagtgattctccagtcgcatcccggcccaggagagggccaaactctaggctttgtggaaggcgagggggtgccggcccggcccggcccggcccggcccggcagtctgcattttaacaagctctccaggtgattctgatgcatacttaagtttgagaaccattgcttgttttgcattaaacaggagattagtctctgcagcttgtgggaataaagctttaaatctctccaattttagctctgtgaaaaggcagtggggagacaggaatgaacggactagtgccacaaagctcaggtggggtgggtgagatcatttagaagagaaagaccgggcatggtggctcacgcctgtactgtcagcactttgggaggccaaggcaggttggatcacaaggtcaggagtttgagaccagcctgcctatcatggtgaaaccctgtctgtactaaagataaaaaaaaaaaaatttgccagtcatggtgatgcatacctgtaatcccagctactcgggaggctgaggcaggagaatctcttgaacccgggaggcgggggttgcagtgagctgagattccaccattgcactccaacctaggtgacagggtgagactccgtctcaaaataaaaaaaaaaaaagaaaaggaaaggctgtgtgtgtgtgtatgtgtgtgtgtgtgtgtgtgtgtgtgtaacagcaccatcacactgtttgagttgaggagcacatgctgagtgtggctcaacatgttaccagaaagcaatattttcatgcctctcctgatatggcgatgctcccctatctcattcctgtgtgtgtttagccaggcaactgttgatcatcaatattatgataacgtttctccactgtcccattgtgcccactttttttttttttttgagttacttactaaataaaaataaaacactatttctcaatagacttgaagcttcaagatttcctggtggacaatgaaaccttctctgggttcctgtatcacaacctctctctcccaaagtctactgtggacaagatgctgagggctgatgtcattctccacaaggtaagctgatgcctccagcttcctcagtagggctgatggcaattacgttgtgcagctactggaaagaaatgaataaacccttgtccttgtaatggtggtgaaggggagggaggtagtttgaatacaacttcacttaattttacttccctattcaggcaggaattgccaaaccatccaggagtggaatatgcaacctggcgtcatgggccagctggttaaaataaaattgatttctggcttatcacttggcatttgtgatgatttcctcctacaagggatacattttaagttgagttaaacttaaaaaatattcacagttctgaggcaataaccgtggttaagggttattgatctggaggagctctgtctaaaaaattgaggacaggagactttagacaagggtgtatttggagacttttaagaattttataaaataagggctggacgcagtggcactgagttgagaactgttgcttgctttgcattaaataggagatcagtccctgcagcttgtgggaataaggctttaaatctctccaattttagctctgtgagatggcactggggaaacagaaatgaacggactagtgtcacaaagctcaggtgggatggacgagatcacttcaaaggtctgtaatcccacgtctataatcccagcactttgggaggccaaggcgggaaaatcacttgaggtcaggagttcgagaccatcctggccaacatggcaaagcctgtctctactaaaaatatgaaaattagctcagcgtggtggcatgctcctgtagtcccagctactcgtgaggctgagacaggagaatcgtttgaacctgggaggcggaggttgcagtgagccaatatcacgccattgcactccagcctggctgacagagtgagactccatctcaaaaaaaaaaaaaaaaaaagaattttataaaatcaggaaataatattagtgtttatgttgaattttaactttagaatcatagaaaacttcctctggcatcattattagacagctcttgtgcagtgggtagcaccagacccagcttgcatggttattgatttttcagagacactttttgagcttattctctggcagaaaggggaactgcttcctcccctatctcgtgtctgcatactagcttgtctttacaagaagcagaagtagtggaaatgtttattcttgaaaataagctttttgcttcacatgatctagaatttttaaaattagaaaaatgtgcttactgcgtgcccttctgaaactaggaaaatatgccttgtgtttaccaattgtgtggttaggagatgggccaaaggcatcaggcttttgaaagtagttgcatttagcataatttccattgccccctgccaatttcatatctgtcacatctaatcagtttaaaataaggggcatcctaagcatggagatggtccttggatggtccttggagtttctgtattttcagtattcttttttttgagcatacaagacatttattgaaaaattcttgggatcaatacttgtgtaaggaaaggaaagggaacaaagcatgattgggcagaggcagaagatgacatcaacaaaggccctccgttgtcagtattctttttttttttttttttttgagttggagtctcgctctgtcacccaggctggagtgcagtggcgtgatctcagctcactacaacctctgcctcccaggttcaagtgattctctgcttcagcctcctgagtagctgggattacaggcatgcaccaccacacctggctaattgttgtatttttagtagagacggggtttcaccatgttggttggccagactggtcttgaactcctgacctcaggtgatccgtctgccttggcctcccaaagtgttggaattacagacatgacccactgcacccggcctgttgtcagtattcttaaacatagacactaactgtaggctgacagcctagcagcaaggaccagttaaagaaatgagtagaactgaagtgtgcttgagtatctctggcagtcagcaaaaacttaatgggaatcatggtaggccaaatgttctgcagtatttcaaaagctgcatgggttttgagaggcttttggtccatcactcaccttaggttgttctacaagcacatcagcctgccccaatttaaacagggcagttagtaatggtgtaataaagagtctgcattgttcattccttcaacaaatactggctataatgtttcagcactgtggatgcaaagtgagcaggataaacaggctcttctttcaaagcttgtggtccactggaccacgtatgaagtagaatagtttaggtccagaaaggcaattaagtaaaatatgaccaagaagaggctctctagtgggtttggtataaagaaaagataagaatgatttagaattggcctatcaatgagataagaggcctggctttctggcactctgctctagggcaagtaaaatggagaattccaaattctgaaattgttagaacatagttctgtgtcttagttaaatatctacacttacagataaatagcataaatgctttctccccatatttcagcccagtcctacttaaagacaacataaattgcaaaatagtgaggatgttgttcatctaataaaagtggttccaggaattcagactctggattcctgtttgccaaatcatgtgtcccactcttaagaaaacgagttggactctggatttttctttgcaagagggacaagagtgtgggagatactgagttaatgcaacttgcaggttttaagtgtcctgtcattgtgccttgtgctttgatacattctgagtttcagtaaagagacctgatgcattggactgttgcaatggaacctgttttaagatcttcaaagctgtattgatatgaagttctccaaaagacttcaaggacccagcttccaatcttcataatcctcttgtgcttgtctctctttgcatgaaatgcttccaggtatttttgcaaggctaccagttacatttgacaagtctgtgcaatggatcaaaatcagaagagatgattcaacttggtgaccaagaagtttctgagctttgtggcctaccaagggagaaactggctgcagcagagcgagtacttcgttccaacatggacatcctgaagccaatcctggtgagtagacttgctcactggagaaacttcaagcactaatgctttcggaatgtgaggcttttccttggacagcatgactttgttttgtagaaaagtacggctggctgggagtttgtgatataatttagttcagtggtattctaagtgttcttagtgttctttcagacttttgggccatctcccaaagggtgaatgggaagaataagctgggtgtggctgagtttaagccaaaagttttttgtgcttgtttcaatcagagaagacctgctttttcatgtttttactattataatactaagcaagagctcatttgaaaacagagttcttcatatttaaaaaaaaaaagtcttgaaaccattgatgggaagatggatatctatttatgtttaaaaacccatcataaagatgacattgtgggctgtcacagttggaaggccctggaattagatgagaccacactatttagcttacttagtaataacattgcaaagaaaaattccgacgaagttttttcagcctaggaatcaatagttcagagaagcactctatgagaatacccattcattcttaaccaaaaaatactggtgagcctgagcagtttggtcatcagagtgttttatatagttccagaacaaatatgtctctaggtgttctgagagctctggtgaaattcctctcgctaccccaaacatcatcatttaatatccaggattctggttttctactcaccagatagattctcttaaaaccagggaaagattcctggaggaaggatgtatctggaaagagatgttccttattataataaaatgaaattgtaatactcttggattttgtgcagcacgaattctttatagagagttggtcctcccagagaattaagaatactcagtttctggaccctgttcccagatcataccctagaatgtgaccttagaaacacacttcaggattcatacctttgattgaccatcaaaaagtttttgtatcggccaggtgtggtggctcacgcctgtaatcccaccactttcggatgccacggcgggcagatcacgtgaggtcagcagtttgagaccagcctggccaacatggtgaaaccctgtctctacaaaaatacaaaaaatagccgggcgtgatggtgggcacctgtaattccagctactcgggaggctgaggcaggaggatcgcttgagcctaggaggtggaggctgcagtgagctgagatctgtctcactctgttgcccaggctggagtgcagtggcgcgatctcgactcactgcaacctccgcctctcaggcttaagtgattctcatgcctcagcctccgagtacctgggactacaggcacctgccaccacgcccagctattttttgtatttttagtagacatagggtttcactatgttgcccagctggtctcgaactcctgagctcaagtgatctgcccacctcggcctcccaaagtgttgggattaaaggcatgagtcaccgtgcctggtcccatgttataattttaaagtaaggtatatttctctacagggatctttgcaaccctaagtaactggcctaaaaagttagagaagctgacttgtgcagacatttgcagcctgttggtcttttttgtgctgtgaatcatagagggtgaaaggttattatgaatggtacaaaactttgttacaaaaccattttcttggactgttttgggctgcttcactgcatgacaaatgctcaccctttcagctggaatgattgaaattttggaaaagatgggtgtttttagaagacattgtaatttgttccggtgctgtgcccattcattccatttcacttctgtttactcattaaacacctattgtgtacacaacccggtaaaatccctccactcacacaatgcctgaattatactcatagtagaatgactgtttagccctcatcatctgataattaacagctcaggtttcaacctgacagtatctctctgggaggattagcagcgtgacagagtgcagggaaatgcaccttcagaaccgtcagctacactgtgtcccatcctgctgtgttgtggttgtgccttgtggatgcgttggtttatgaccaggtattgattaaggtggctactaccaggtgctttctgcatatctcgggtttgtggagcactcaggttctgcttctgcccctctgctgttaccaagagacctctcttcaaaatggggctcttgagttagagtagaatgagtgatcaggattgttttgtgtaaagatgatttctgaggaaggctttaggatgaaatgacttccaaacattttgaaatgtgactcttacttattgaattaagcagggccttaattggaatgctgggactgatacttgatttgcattaagcagcctttttctattgctgcttggttgaaatttcaacatttgtgatggtagatggatgtgacatgtgatgacattgcacatgggcagttaactgtgccaagaagtgcagcagtagcagcaaccggagatgcaaagcccaacatgatggggagagaaactcttctttcaatatgtgcttctgtaccaaaagtggaatttcacgagagacatattttgaaacatttctccttttgtgtgtgcgtgagtgtttccctgtttccagccaagggtattgtgagtttctcctgggcctccttcagaatctgggtgctctggaaagcagtgttttggcaacatggggaaagtatggcagtgtgggagggtcagctgggtctgggtttgaatattgcatttgaatattttaccagcattgatgtcggataaattatttagtccctgtaagcctcagttttctcttcttctacatacacataatatatttgactctttgttgtgattattggttacacatatgaagagcctggtgtggggcctggcacacaataggtgctcaataaatagaagttgataatttaattgacatgagtagtagaaattatgtccttgaaaacaattgcgtcaagatagaagttttcagccaggcacagtggctcacatctgttgtaatcccagcatattgtgggggccgaggcggatgaatcacttgaggccaggagttcaagaccagcctggccaacgtggtgaaatcccctctctactaaaaatacacatatttgccaggcaggcgtggtggcgcacacctgtaatcccagctactgaagaggctgaggcacaagaatcgcttgaacccaggaggtggaggttgcagtgagctgagatcactccactgcattccagccagcgtgacagagtgagactctgtctcagaaaaagaaaaaaaagatagaagttttcttctgtagatcagtgttagaactcataccaagcgaagtggtcctggtgagtatttcagtgaaaaactgcattcttgctcagatattgtcaagacttttcacccaaagattcttatttatgtctcagtccgtaccttgtgtgaaaattaatactggatgtcagaacgctgttgtgtttttaaagttccctggggttaagagcagtttccattaggtgttctctgctttttacttaaaaatcttactcatgcattgagcaatatttattcagttcttattatgtgtcaggtattttctaggagctggactcaactcaaaagatatccttttgatgagaacaaaggtgggtggatatatgaaatattatctgtgggataaatgcacttagtcatgagggagacttgttatggagtgcgctcattgtatttgtactgttgagttaacaacttctaggaggagctcagggccacctggcaggggcttcttttgtcttgctgctcagcaaggtgtattttgctgtagagtgtgctgggcaggtgaacttttcttaactttctcttgggtccttcctaaagcagcatgtacctttcccagagcgaggagagggccaccttcctgtctcacagaaacctccaatctgttttggactgcaggaaggagccatagtagtggaccagcaaattttggcccgagagattgatttgcttccgattgtactttttttttttattgctactataacaagtcaccaaatacttagcagtttataaccacatacatttattatttcataaggccagaagccaggatacagtagagctcacctaggtctacttcttagaggctcacagggctgatatcaaggtgtttgtggggctgtgtttttttgggggggctctgaagatgaatctgctttggagctcatccaggatatcagatgaattcagtcccgtgcagttgtaggactgaagtccatttccttgctggctgtcagcaggggctggtttttgctcctaaaggttgccatcattccttcttatgcttttcatgtgactcctctcccacaagtgggttgagtatctctcacactttaaacctctgacgcctcctgtcacatctgtctccagtcagagaaagttctttacttttaagggctcaggtgtttagtttgggcccattcacataatccaggataatctccttattttgaggttcataactttaattacatctacacagtgcatttgctatgaaatgtgcatattcacagactccaggaatagggtgtggacatctttgcaggggatattcagtctgctgtagctttcttgattggaaggaatagtttatcatatatttgaagtgttccctcagtgcctttggcttttgttgacccctctgcagctctctgctttttcttgcccatatttggaaagtgactctaaagcataataagcatcacctattagggtttttaatgtacaaaccaaacagaggtgactttgggaggagaacatctctgaactaggtatgagacattcatcgaaaaaaatccatcaagtgtttattgtatgtctgctttataccagcactgttctaggcactgaagttcgaccaccaacaaggcagttgtgatgcacttggagctttcattctgatgggcattgagatccaggctgaaggctgagtctgggaatttgaggaattctttgtaggtcctgggtctacagagtgagagctgtcctcgttccagtttcactgatgacctctcgaccagctccctcacagcagtctttgccaacacagacactgtgggctgtagtgggaggaatgtggggttgaatgagctaggtttgggctctgtccttgactcaccattgcctcagtgatgtgaaaatggtgtctgatccttaaggttggaagtccaggcatgcagatttatctccatctcaataacgtggggaaaaaaaagaagtggtttttgtggaaccagtggttccactgtccacgtgtcttccagtgtgcctagcacattcccaccaagtggatcttggttcatgagggaaagaagggaaagtgagggtgccccgaggctcccagaagacaagtaatgtcacagctgagctgtgtacagatcgaagaagcagatggataaggagtgaacaaagtcatccttgtcttgaggggtctttatttagcttcttcttgactcttagacaaggacccagaatacagatggggcttgttgttaccttcagcctcatggctttttagggctagatacttcagcttgttacatgcagtccttaaagcgtctgtgtgggtttttgcaggagagaacacttgctcgtgttctcctgtctggaacccggacattgttggaaagtatcagattttgtttggctttgtgtgatttgactgcccacctgtttacttgctttctcccagcaagcagccgcaatccccatgggttggtaatgggtggaatgacacactgtgtagatttactcttcagactctatgttcacctcattcttatgggaaaagaagagcactagctggtagatatagcagtgtgttaatatgactgctcaactccatttacacagacattttcaccttagttatactatttcttcattaaatattgttgccagatctaagatacaggtttaattttttcctctgaattatgtggtagtagatgtatttaactatgtttagaaacagcaaaaaatgaagcgtttgaatgcgttaaacacatctaatttgaaagttaatatttaggttgttgatttattttttaaaagattagaatattccttagaaatgtagtcttataatttcgtatttcaataaaaaatattaaaatgtttcccagaggaaatctttactgtcatagaaatcaccagaaagagatagcaattactcctgggtggtgatagtctttgatttgtggtttacttgttttcagtttgaactaaaacatactaatcccagcctgagttggattttgcatatggtcaaagtgaagtagagatttttgtctactttatgaagatatttaaaggacatttgaaatgtttcaatgaacacattgtaacatgcattcccaggaggaaaacaaaattgtgtattgtgttgaaaatactattccaatatatgtatacccacgtctcattttgtcatagaattcctgaaaaatttagatgtagatgagatttttataagttgaaaatattttcagttgcattttaattgcacagatgtgttttctacttctatttggctgtgactcctaatgcattgtaatattatcttccagtgttcatttcgtgtagtgataatggattaacaaatgcattcattcatttagtaaacatttactgagccctaatcagtgccatgctctggcccagggaggtagtcatgtgcaaggtccagccctctctgtttcattcctggttggggaatgggtgggacagaccaggaaaggagcagctgccgtatagagcaggagacgctctgctgggtgtgatacagtccctgatggggcctcctactgcagtctttccagtcaggaaagaaacatcctctaagtggggacctaaagaatggatgtcagccaggtaaagaacagggagtagaatgttccaggtagaggacatagtatatgcattggtccagagaggagagggaagagaaggtggcatttaggggaactgtacctgattgagatagttcagcatggagcagatatagctgtggggagtttgatgggagaaggaacgatgagacgtgatgcctgcagaggtgggcaaaggtcggctgaggcaggtctttcttcacgagccatgtgaggatatagggccttatcctcagagtaaagggagccattaaaggctccacaggctgagtgacttgatgaggtgaatacgaaacagagcatttctgtgaatgtgaatggcctttggagcagaactaagttcatgaggatggaaagaatataatgaagccatctcttagacccagaaagaatggggcacaacagcctttatctttctggggccaatgtcacagaatgccatgcttttaggaaacatggtatgttgtgattaacacattttgcagaagtgggtgggagcttttgaataataacagtaagcatttgtgcattcttcctgtaatgacattacagttatgatctgaaaatattgagtcatacatgaattcctgttatcttaactcagaaaatatagtccctcactaaaggttttattttccttctttttcccatttcctttacttcgtataagaaagtcacttgtctcctgggtgcaatggagacctatgtgagttcatagccaagagaatgtttttggttagaaaaataatagtaggaattccaagctgtgaattttttactgaagctctttggaaataggatttggcaagttttgtctgccttcgtcaagtaagcatgagcaggagagcacagttaatagcaggtgcagacacatgattctcagaccgtattttgtgttctagtttcaaggcatgaattctttcctggggttaattttattcaaggaagttatctgtctgttagatctgatatgtgctcaggccaacatagattctttacccttcctttcttcctgctcacctgtccttcctcttttatcttttcattgaattaaaaagaaaattatgaaatagtttcaacatgaaaaaaggtacagagaataacataaagaacactcctggctgggtgtggtggctcacgcctgcaatcccagcactttgggagtctgaggcagccagatcactggaggtcaggagttggagaccagcttggccaacatggtgaaacactgcctctactgaaaatacaagaattagccaggcatggtggcgtgcacttgtaatcccagctacgtgagagactgaggcaggagaattgcttgaacccaggagggggaggttgcagtgagctgagatcacaccactgcactctagcctgggtgacagagtgagactccgtcttcaaacaaacaaacaaacaaaaagaacactcctgtaccatcatccatcattttgccgtgctgactccaggttctatttaagaaataaaacattacaggtacagctgatgccacctctgtttccctagctcattcttcagagataactcttgtcttgcagttggatgttttaatcctctatatcatgtatacttacattctatgtataacaatatttggtactggcctaaatgtgttcacattgtataagtgtgcatattggcctgccacttcatttggaattatgttcttgagatttatcaatgttgatacatgtggaatctggttaatttttgccatagtattctatttttatactaaacttttaaaaatccatgcttctagtctttggcttattttttcaggttatggtatgttttggatgcacagaaaagtaaaattaagtcatgagcaaaatatctggataatccaagctttaaacttgatgtagaatttgaatcatgtgtgttttgttaaccctgtgatgtcaatccatgcctgattgtgtaactccaaccaatattcctttgaaaatggaaatttgtttatattgactacagattgccaatattattagtaaatgctgagcacttaatctcgaataaagaactagtttaaaaatgattctaacaatggcattgactgttctaccttattactcatgggtgggttcagccaatgtttctgttggagaccaaaaccaaaaacagtcaaattaaacaagcagtcaaacccaacatacagactactgataagaaggtcatatcataagatatggcattgaatttgtgtctgctaatgtaaaaatctgatgcccacagcaaacttaataaggacctatgtttacatccatgctcaattacattcctgggttaaacagtcatgctttaggccctgctgtgtgcctggagttttgctgaagtgtggggcttttaagagaaggagaataagcttgctccagagttaagaaatttaaactaaaagtcctaaagatgttggaaaaactattgcccttgaagatgtaaattcattaagttggagaagaccttttatacaaacaacagacccattcactgatttgtacccttcaggagacagatgaccggtaatggtgacaatgggtgaatgttgggtttggggtttttagaaacatctgcacttggtgactactgtatctaattggtgtgacaaacctggcaccccatgtgtttggcaccatcttgggtcctactcagggccaggtgaaccgagtggcctcttcactgcttcagagtctgaagcagattgtagtatgcggaccagacacagaatataccaccaagcacgttggcgcaaagcatactgggaagggaggctttgtgaacatggtgctggttctcaaacctcagtgctcaaaagagtctcctgaggattcctggatcacactcttaaacttctcattcagtaggtgttagctggttgagaatctgcatttttttttttttttctgagaccgagtctcactctgatgcccaggctggagtgtattggcgccatcttggctcactgcaacctctgcctcccaggttcaagcaattttcctgcctcagcctctctagtagctgggattacaagcacatgccaccatgcctggctaatttttgtacttttagtagagagggggtttcgccgtgttggccaggctcgtcttgaactcctgacctcaggtgatccacccactttggcttcccaaagtgttgagattacaggtgtgagccaccatgcccagcctgaatctgcatatttaacaagcaccacaggtgattctgatacagtagctccccaaacctcacagtgttagtgaatcccagtcatttacaattctgccatgattttggtcatattcaagtgcagctggtagcatttttagttaatatattttttaaattaagtcacttcttttggataattaaatttaattacaagggaagctataccactgctgtaaaaacatcacctgctttaaagagaaggtacataatgaatatacattaagataaagatgtatatgtgtgtgtgtgtgcacatataagtatacacatacctaccatagggattgagttttccttcaggtttttcaactgaaatgtcaactttgaggccagttaatatgtgtaagatatatgtgtgtatgtatgtctatacatatagacatatacgtaaaaacatacatggatgcatatagtatatctatacacaacctattatgcatatcatgtatatttcatccacttagtattatcttttattttgccgtttggcaaatgctcagtaaaagaaaagggttagaaggggagaaaggcattttatcccaagccttcaggaatcaggatgaggatgtcttcaccttgtggtggggagtaattatacaattagagacagcacattggagtgtggctgatatgctgtgtgatgatagctctagctctctgcctagcagaggaaggacatttcaatagaagaaaaagtttaagaccttgccgagaaacagagaaaggatgtttgtctttttaagaagttgaaaaccctgtttgcagacaaaagccctccagttttggcagtaaactttcatgcaagggaagaaaaaggcaggggatgacattgttgacaattgtgaggaattaccatgtgccaggcactgtgcgaggggctttgtacatatcctctagttttagtgcttataaaaactctgtgatatgtgcacagcattttaaactttgctgcatagtcgagaaaatggaaggatggggaatttgagtcatttgcccagggttctatagctaccccaggttcccatgactggagaattggggcacagggtggcgggggagagtgagtgacaagaatcctaacaatcttatttccattgagtccttataaaagaagtggattaactaccacgtttttaagtttttcttaaatttaggttatgtggatctggcgtttcttgttttgtcctgggtttgttttgtttttgctatgctgtcttgaacatctgtcatcttgtaggcctaacggtaaacacaaaaacactttacctcctatagctttcaattaagatctctcagtttgtgtttgtaatagttttccaggcaagttctccctaggttcggcttctagtgtgttaacctttagttataaagtgaacccaaagagagaaagtagaaacaaaacacctcacctgtttttgctcatgaattactctctatggaaggaacaatcatgaacacctctgcgtatcacagaggcctatctgagtctgacgtttaagggagaccgcgtaggtccctttgaggactgtgaatgtgggagtcctgggactctggtgaagaacccgttccagaagagatgaatgagctggacaagttctttcatagaacctttaggcaggttttcttagaaatgcacattgaggattatgcttggatattgtgatgatcagaatgatactcaatcccttctgcatttggaattctctttgaaagaaaacatcccaggcagctatttctcagagatagtgagtcccagccacttctagacattttcttgtgtagtctacattataatttcacagcagtctctgatatgacaaatgtcaaaatagcccaaccttctctaaacttcagagatgtctgatatgatattgaataaaacaatgctcatagaaacatcaagaaaggtggattttccctggatacttttttcctgcttgacaaataacagtgaagaaactgatctcacgtctttttctctttggaagcctgaacactcagaacccaacttgaggctcctcagctatagcaattctgacttcacagtctgtaaattattgttcttttttttctttagcttatgctttctgccctaatttatcttttccctgttctaatgaattattgtcctatatctgctgtgcagttaggtgacatataacagcaattaaatatatgaattggtacatataaagatttgactaaaactcgatgtaaaaataagtgttctacattcaatttccagtgttagaaacagtgctgacttgaacagagtgacagaattccatctttccctatttttgacagctttaaactttatattttcttcctttcttgtgagccgtcattaacttgtttctcaaagccattcccgtattacccatcttgcagacgcagacagatttgggaatttgcggtcagagttgtattggacacatccccccagcccacatgagatccttttaatctattgcatattaactagttttaagtacaatattcctacttcatttaaaaccattaatcaaagaatgagtttgaaaatgaacaaaatgcaaacttacagttagaaataattgtagtgtctttagttttggttaggagtcggtttcttgtttgttaaactcaagattgtgaacagttttaattcacttgtttatttccaatagagatttcaggtttacatttgaattcagaaacaaagttttctttctcattacagagaacactaaactctacatctcccttcccgagcaaggagctggcygaagccacaaaaacattgctgcatagtcttgggactctggcccaggaggtaagttgtgtctttccagtaccaggaagcggatcatccactgtatcagtattttcattcctgagtctggcaagaggtccttttgagttgaatatcacatgggatgtaatatcaattttcaaagtataagtgatgtaaacaataatgttttgatttccttattttagaaatgaagaaacctaaaactcatagatgtctcagagctaattggttagtggctaacagctggatatctagtttagaaccttctccattttttctttttgcccctaggtaatcatacatttgtaaagaggagaattatctctgccactgcccatgcactgcttttgtctgaccagcaatttctccatattgcttcttcagtagcaaggccaatcattttaccaacacacatgcttgctaactaacaggaataacgtggtacccctaattcagccctttcccttgaaagcatctggcttctgaggttcaactatgggaatatggtctcttaatgaacattaagttgagtttgccttttaggtccacatgttgacaaatgtatcagagtaatctctgtcctaggatcagagggcctgtaggcacttgcaaaagcagttagctctgactcccagccagtgcacactccacctttctgactcccagccttgtctcaaattaggcttggaagcgaggaactgtctggtgtcccccagcataggaagctgagccagggggcagtgctcacaaacaatacagactttaacgtgtaggatattggaaaataataatttgtggggaaattgtctcagacttggtccacccttatttttagctgcttctctaatccgtttttctttttttggtgcttgtatctaacctacccattttttggtgcttgcatcattttttcaaatatcaaaaacgaactttatgttttctaacaatgaaagtattgcatgttcattgtggaaaatgctgaagacttggaaaatacaaaaatgctgagatcaaacactattgatacgttagtgtatttcttcctgtcctgttctactttctttctttgaattctgctcacgtgtttctgactgatgaggtctgacttttgggttccttttccagaggagaagccttctttcagcttgccatttgttaccctggttatgaaggctggtaaccttttttactaggtagagaagctggaccaactggggttcttccagggggagaatgagaaagagaaactgttttgcaagtccgtagctatttctctagggccctgttagctgacattgacatgccttgcattgctctgcagatcccctcgcagccctctgtcccttgttcatttctggccttagagaaagcaaagcagggtctgtaacaggggaggctgcctctaaactcagggtttggttacagctgttttcacttacatcactggccctggttttttttttttttctggcattaaaaaaaaaaattggaagcaggtgatgttcccattgctgatgtggtggaaactctccaagtgaacaatatacgtttttcttggcagctgtttcttgtgccctgcttgctcctggtccaggacaagcaaggaccatctgcctctttcaatagaacacctccagatccctttgatcaaaagttactcattgtctgacttgctatttctgtgagataaatgggagaagatcaataaatgcacttgtttgtccagtcagcgtgtggaaagttgataattttgaccaaagcacaacccttgaaaggaaaagaaaaagggagtgaatgtcttctgagaagctgcctaggttcagacagtgtcacccatttccctgtatgctccacatgacaaacctgagtgggtctcatcatgtccattttgcagatggcaccaaggctcagaaaggttaggcaacttttccagtcacccaatgagttaattgacaaaactgggattcaaacccagaactgttggattccaaagcctgtgttgttgcctgcttcgtgaaaaactccagtagcgactggaatagaaaggagaaccttccaagaaagaaaatacgcactagcagaacctggaaattgggaggaaatgaggacttgaggaataagatgaatgaaagctgacctgagtttcacatctgggtgatgggaagggaggacagggaggcagcatctcagatgtccacccagcaccgaccagctgcctggcattgctaggtgttgaggactcagcagtgaacacgctaacttctctgctttcttggggcacgtatagggtgagagacagaaacaaacaggtcagtgtacaatgccacaggagggatatatgcagtgaagaaaaagcagggtaaggggcatagagcatgagaaggtgctttttttaaagggggtgattaggaaagctctctctaaggtgacagttggacctgaaggagatgatagcatgtctgtggtgagggaaggaaactccgaacaggaagaatggcagatacaaagacattgatgctagagcatgcctaaggaatgtgtttaaggaccagggaaagtgagcaagtggtggggggaggagaggagctcagagcaggaggaggtgagtgccatacaggcctggcaagactttggattcctgctgggtgagatgagaatccagcggagggcttgagggaggggacatgatgtgatctagagtttagactgtttacactctggttgttgggttgagaagagactgggatgggggaaagggaggacaaaggacattgtgctggattgagaaagcagtaagtcagtttcattcattcactcaaccgatgatgttcaaataccaccatcatccgtgggctaaaggatgaagagccatccctccctgagagtcaggaagcacttcccagataaagtttggagtgtgagctgaggtgtaggagaaagagtaagagtttacccctgaaacgggtgctgggaagagtcaatagtttggaataactcaataatttatggtgcttctttagaaagatttgctggctttatgtgggaagaaatttttttttttgattggggagtggtgggttggtggtgaggctgcctgtggaaagagaagtgagtgttttgactcactgttatttaaaaatctctagggctgttccaataagcaacaaaaggcaaaatggcctggttctctgtcccctttctgtctgtatgcctcgtacaggttatgaaaagaaaaagttgggaaaagctgtccacctcacctaattgtgttcttgtggagtgtgctagatgccccctctctggagaaaaaaaatccttgtggcctctgacccacctctggagagcctagttcccttctggaggcagaaggcaaagcttaggacctagagagtgctggaccacgccactcacaggaaccagcaggctgtgaggttgaaagctaggcatatggagctttccaggctgggtgcagggcctcgtggcccttcccctcccctctgtgctctatagctcagtcttcccaggcggtgtgaacacgcagtgacatttccaggaatacagggatttattaatgatttcttgtgaaatgtttggaaatacaaagtactctataaatatttcataatagcattggggctgagaactccacaaagtgccggaatacatttgcatgtaagacagaacgctgcctgggtcattgatgcctgttgagtggcagtcacagacactgcctagggtttctgactcacgctgttgggactgttctatgcagggcaccctcttgtgtggcataggatttgtgcctcaccacacactgttgtagctttgctgtcttgatgatgagtagagggcagtgtccaggccatggtataagcatctactgccccccagggttaccaaaaccaagccaagttgtgtctcagcgagctccgtgaagcatggagaagttgagtactcagagacatgacgtgacttttcaaaggctgtaagctgacgagggacatagctagggttcagacttgagtttttctttttctttttctttttcttttttttttaagactgagtcttgcttttgtcgcccaggctggattgcagtggtgcttggctcactgcaacctctgcctcccgggttcaagcaattctcctgcctcagcctccccagtagctgggattacaggcacctgccaccatgcctggccaacatttttgtatttttttagtagagatggggtttcaccatgttggccaggctggtcttgaactcctgacctcaggtgatccacccgcctcgacctcccaaagtactgggattacaggtgtgagccactgcacccggcccagactcgagtttttcatcttaatgctttttcattgcctgacactttactgagaccaagatagggaacttcacatacagtaccttttctcccaaggcggaagagggctgttcaatttctacactagagttcggggagttttagaaatgagtcagttatcgaggatgagagcagttcctgataggctcaaccacaatgagatgtagctgttcagagaaagcattcttttatctataaactggaagataatcccggtgaaacgaagcccagccccaggggcttcactaactccaggctgtgcttctcaaactttagtgagcataggaatcacctgggcatcttgtgaagctgtagatttgaattctgcaggtcggcagaggggtctcagaatccgcatttccaacaatgtctccagtaatgctgatgctgctcgtccctggaccacagattgggtagccaggttctggcaagctcatcccaaggctttgagatgacatcagacaaaatatgttctgggacatggcttttgagaggtcaagaaaataagatgtttctttctcttctcatccccaacccttgcactgcccttttctcccttcccctaccctcctttctgtccccatccctgacgccagctgttcagcatgagaagctggagtgacatgcgacaggaggtgatgtttctgaccaatgtgaacagctccagctcctccacccaaatctaccaggctgtgtctcgtattgtctgcgggcatcccgagggaggggggctgaagatcaagtctctcaactggtatgaggacaacaactacaaagccctctttggaggcaatggcactgaggaagatgctgaaaccttctatgacaactctacaagtgagtgtccatgcagaccccagccctgtccccaaccccatccctcccttagttctggccttggcctgtgtcatctcctccctctgtagcagcgttagatgtctacatgcccatttgcccaccagactgagctcttcctagaggagagaggcttctcttgaatagctacctgtccccagttctctgaatgcagcctggcacatctcaggtgcacagtagtgtttatcaatggaatgaatgattgacagccaaccttctggttttctgggggatgtggaagggtggcttccagggtgatcaagaatgagataatggcagaaggacaaatcctgcaagatctcacttatatatggaatatatgtaaggtagaaagtgtcagtttcacatgatgaataagttcctgggatcttgatgtacatcgtgatgactatagttagtaacactgtatagtatacttgaaatttgctaagagagtagatccgaagtgttcacactacacaaaaaaggcaactatgaggtgatggatttattaacagcttgattgtggtgatccttttacaaagtatacatatattaaaacatcacattgtataccttaaatatatacaatttttatttgtcagttgtaactcaaaaaagctagaaaagcatttttaaaaaggatgatgtactggtcttaatattaccattgagataagctttataataacataaaaagaaataacagtaatgataatagcaacaacaacaacaacaaagaactaacatttaagtagaatttcttgtgcactgtgcattctgtttaagttatctcattttaccctcatgataaccctgcagggaagattctttaaccccacatttcataggctcagagaggttaagtgccttggttagagccacatcagagttaatccacaagagccaggattcaagcccaaatctgcctggatctgtgctctctaagataactgttagtggtggcgtgtgtgttctcacactcagacatttgatctgccctttgtttcccattcttagctgcaaggcagtgttaaagaaccctgtgtctccatatccactccccacacttaagcacttttgtgggcccgtgtgccgtatgcctcgtggcagcagggatccaatgtcacagttttaggcagtggcatccttttccttgaaaacttgatgcaggggaacctttctccatttccaaccacaggtgtgtctttcagacactgagtgaggcaggttttgtactttattgtaacacaagaaccttttcttctctggagtaaagcactccagacattcgcaagttgctttacaagccttaaaaggatggtattgtaggcaactttaattaaatcccatctcctcctctcccccagcttgcaagttgacccaaggaagccttcatttccatgacagacttaattgtgagggcatcctcattaaaaaaaaaaaaattctattatctttccagcatatagaagatacttggtatctaaaaatccctgaaaaacttagaatgaatttttaaaaatcagggatcctgctggataaccaaacccatttgtctgttacaacttttgtatttgggtttttgttaagtgtacatatactagtttgtgttaattaaagagaatttttttttttttttttgagagggagtctcgctccgttgcccaggctggagtgcagtggcgccatctcggctcactgcaagctccgcctcccgggttcacgccattctcctgcctcagcctcctgagtagctggaactgcaggtgcccgccaccatgcccagctaattttttttttttttgtattttgagtagagacggggtttcactgtgttagccaggatggtctcgatctcctgacctcgtgatccgcctgtctcggcctcccaaagtgctgggattacaggcgtgaaccactgcgccctgttgagaatttttttttttttttttgggagacagagtttcgctcttgttgcccgggctagagtgcagtgacacaatctcggctcactgcaacctctgcctcctgggttcaagcgattctcctgcctcagcctcatgcgtcaccacgcccagctaattttgtatttttagtagagacagggtttctccatgttggtcaggctggtctcgaactcccaacctcaggtggttcgcccgccttggcctcccaaagtgctgggattgcaggcatgagccactgcgcccagccccaaattttggtttttgcttgaaaactgaggtctgaattcagccttctggttgcccctcaagagtcagtttaaatgttggtcatgttagttgtcagtgaaaacaatggtgaggctggcatgagagtgtgaatctggatgggagggcttgtgcttcatgaaaacatttttccagatcagctcagtcgtgagttatccgtcattgacgttataataagctctgattatttatcaagcatcattctttatagatatctcagtttaatctgagataatcttctccacatctctccacatagatgttatgaattttacttttacagaggagccaactgaggctcagataagttacttattatatgactagtagtggtagagctggggtttcaactaagaactctctggctccaaagcccttgtaagtttctatcagtatatgaccatgcatatgagcatttgtctctcctcttcttcatagctccttactgcaatgatttgatgaagaatttggagtctagtcctctttcccgcattatctggaaagctctgaagccgctgctcgttgggaagatcctgtatacacctgacactccagccacaaggcaggtcatggctgaggtaagctgcccccagcccaagactccctccccagaatctccccagaactgggggcaaaaaactcaaggtagcttcagaggtgtgcgctaagtatactcacggctcttctggaattcccagagtgaaaacctcaagtctgatgcagaccagagctgggccagctccccagtcgtgggtatagaatcatagttacaagcaggcatttcttggggatggggaggactggcacagggctgctgtgatggggtatcttttcagggaggagccaaacgctcattgtctgtgcttctcctcctttttctgcggtccctggctccccacctgactccaggtgaacaagaccttccaggaactggctgtgttccatgatctggaaggcatgtgggaggaactcagccccaagatctggaccttcatggagaacagccaagaaatggaccttgtccgggtgagtgtccctcccattattaccatgtgcctgcttgatactggagaggtgagtttctggtcactttcccaggtgtgagtgaggtgagaattctttcagtttatctagctgggggaatgtagtgagcatagctaaagtcacagggcaccacctctccagaagtacaggccatggtgcagagataacgctgtgcatatcagcatccatgccactcacggtcaaatagcagttttctgcaaaacttagtgagggctggtgtttggaagtggagttgagtaattgcagtaccctattttcctttttggctgcagcctctcagccagccacagcatctccctgtgtcttggtaggttttggaaagaagtgtgggagcaaaagcatgatgttacatgtagactggcctgagatactcattctcagggcactgtgtgaatgatgagctgctgttactgtgtggaggggaaatgcacttagtgcttcagagccacttgaaagggataagtgctctagagacaattgggttcaaatgtggagcaggctgagcaagaacagaatgtctcctttgcctgagcctgagtgctgttaatcacatcttcctgccttgggctgagttagagaatcattagactatttcctgtttccatggtgagggaggcctcttccttttgtctctgctccccttaagaagcaggtgaggattttgccaggtttcttgttttgaaccttattgactttaagggcggctgggttttagagactgtacctacctagggggaacacttccgaagtttaggactattccctgatccgctgggaggcaggttactgaggaagtccctttaaaaacaaaggagtttatactgagaaaagcataaacagtgatttgtatggattcacactgactaatatagctcatgccattaaagtggggtctcttctctaaaggagggttatatgatctagccccgtagacctaagtgtggtttcagacctgttcttcctggtcctctccttggaatccatatttctactagttggactttttctgtttgtctggctctcagaggattataggaggccctgtgaagtgactcagtgaattttgatttgtgggcaagtagatggttccctagtctgaaattgactttgccttaggtgcttcaattcttcataagctcccagttcttaaaggacaagatccttgtaaacatggcaatggcattcattaggaatctagctgggaaaatccagtgtgtatgcttggaaatgagggatctggggctggagagaaaggcatgggcatgccttggagggacttgtgtgtcaagctgaggacctttactttaagctctaggggaccaggcaaggggagatgtagatacgttactctgatggggtggatgaattgaagaaggatgaggcaagaatgaaggcagagaccagggaggaggctctccaagtggccaaggcataaagcaagaaatgaggcctggtgactgcttagtggcagagcagtgaaagagagggaggcatcaaagtgagtctcgatttctagctgggtgggtggtagcgatgtccagtaggccagtggctactgaggtctgcagtggaggagggtggttgggctggagacagatgatgagggagtcatcagcctgtgggtggaagaaaagggaacctcttccaactgttttctttgcttcttccctctctttctctttttttttttttttggacagagtcttgctctgtcacccaggctgaaatgcagtggcatgatcttggctcaccacagcctccgcctcctgggttcaagcaattctcctgtctcagcctccagagtagctgggattacaggcacatatcactgtgcccggctaatttttgtattttcagtggagatgggatttcaccatgttggtcgggctggaatgaactcctgacctcaagtgatccacctgcctcagcctcccaaagtgttgggattacaggcatgagccaccgcgcccggcctttcttccctctcttaaagagtgtttatttaattccacaaacatgagcttgtcaccccctgtagcctggcatctcctacacgaggtgatggctgaggcttctgcttctgctggggtagctctgatctttctgctttctctggcactgtctacccatgttgcctcaccccacaggtcccagggcacctctctcgggcaagtcttggaaccctctgacactgatttgctctcttttctgagctgcttttagccacccatcctcgggacctgttttctctctgcctccacccctgcgggcagtcttaggtctcctgcccctcacgagcaccccagagaggccacgtgctcagtgatctcagtgggcgcatctttctagtcttgctattctttttggccatgttgttcagaaaccatactgggcagggccgacttcaccctaaaggctgcgtctcttcactctgcttttgtttgttccaaataaagtggcttcagaattgctaaccctagcctctgtgaacttgtgaggtacaattttgtgtctgttatgttaacaaaaatacatacataccttcctggtgatggtataaattgctattctctattggaaagcaatttggaatgaaaatttaaagaaccattttaaaatatgctatcctgcgtacctccattccacccacccccagggatgtagcctactgaaataattttaaagaagtcaccatatgagagaaaatgttattgctatattgttattgtgagaaattggaaatagactaaatgttcagcactataggaataattaatgaaattacatatactctatacaatcattatgctgccattgaaataataaatacaaaggcgcaaggggggaaaagcttataatgttagtgaaactaagactgatttttttataaagcagcagttttcagacccttggagactccaattcggtagaaccagagcttcatcttctctgtcgaagctgtgacaggagttgcaaatgcctctcctttttgctgagtttgcagctgctgtttttccggcagcacatctgtgcaggcctctgcctcggcccctctggatctgctgattgagcagcggattgatctgtccttctctttcgtgttgacccatgtgaggaaccaactggcaagggaacaagaaatggaaataggcctcctttgcatcatgacctgtacatcctgcaattggaaaagattgtactttagttggtttaaccagcagcattatttttctaaactaagcagtaagaaggaattaggttttatgtgggatcaacagactgggtctcaaaagaggaaggtgatagaacacagtggggagggggaggtgcactagaaacagagggcctatgctttcattctggctttgctacttaatagctgtgtgacccaatcttagagacttaacctctctgaacttccattttctcatgtataaaatgggaaatattaaaggatactcactgggctggtggcttgtgcctgtaatcccagcacttggggaggttgaggtgggaggatcacttgagcccaggtgttcaagaccagcccaggcaacatggcaagactctgtctctatgaaaaaattaaaaattagccaggtgtggtggtgtgcacctgtagtcttagctacttggtaggctgagatgggaggatcacttgggcttgggaggtcaaggctgcggtgagctgtgattccatcactgcactccagcccgggcggcagagcgagacactgaatccaaacgacaacaacaacaaaaggcaaaaaaataaaagtgccctctttatggagttgtgtaaggtgaagcatatacactattcaacatagtaactatataaaggaagtattgttgttgttactgtagttaataccattaagtgagatgtttcgtatagtggaaagcacatggactctgaattcagactggtctgactttgagtctcagctccacatctagtaatactatgaccaagccctggttaaaatcatgtttttttttcttcagcctcagtcttctcacatataaaatagggacactgtcatttacctcagttttctgtgaggataaaacaacgacagtgtatatgcaagtattttgtaaattttgtagtgctcctcaagatttagttggtgtttactacttgtactttctcactggaatggcagatgctgttggacagcagggacaatgaccacttttgggaacagcagttggatggcttagattggacagcccaagacatcgtggcgtttttggccaagcacccagaggatgtccagtccagtaatggttctgtgtacacctggagagaagctttcaacgagactaaccaggcaatccggaccatatctcgcttcatggaggtgaatctgttgctgggatcatttagaaaagacttaacggcttctttctctgagacgttacaataaggttcaggcaggaggcaagtttagaaataatgtatagtctcatttacaaaactatccctcaagcctaacacaggatttgataacaaaaggcacttaataaatgttagttgagtggttgaatgagtaaataaactctagctttagtaaattaactctagcttattctatataggctcaagagaatatttctacccattttcttctaggttttcctatctcagtgactaatggtagcaaagcattcccttaaaaaggcattatttgtgaaacttatctaaaatcgaattcgggtccaattaaatttttgaaattttatattaaaaattatattagtagggatgggtaagaggtgttttggtctggttggttggttagttgctatgactcagaattgctaagaaaacagaaaagtaagataagatcattgttttaacctcttttcctccacaaaatcaataaataacatatccctaaattactcttagaatttctcttaaattgcagtgaaaaaccaaaatccttcattcttggttgaaggttggaaaactacgttagagaggattagagagagaggatgagcaatcgtgtagtcagcccttgcctcctagtgtaggatttgtctcagccactgcttgttgtcctggctgccaacgttctcatgaaggctgttcttctatcagtgtgtcaacctgaacaagctagaacccatagcaacagaagtctggctcatcaacaagtccatggagctgctggatgagaggaagttctgggctggtattgtgttcactggaattactccaggcagcattgagctgccccatcatgtcaagtacaagatccgaatggacattgacaatgtggagaggacaaataaaatcaaggatgggtaagtggaatcccatcacaccagcctggtcttggggaggtccagagcacctattatattaggacaagaggtactttattttaactaaaaatttggtagaaatttcaacaacaacaaaaaaactcaacttggtgtcatgattttggtgaaattggtacatgacttgctggaaggtttttcataggtcataaaataacagtatcttttgatttagcatttctactcaagggaattaattccaggaattttggtggcaggcacctgtaatcccagctactcgggaggctgaggcaggagaattgcttgaacccaggaggcagaggttgcagtgagctaagatcgcatcattgcactcccgcctgggcaataagagtgaaactccatctcaaaaaaaaaaaaagatacaaaaatagaaaaaggggcttggtaagggtagtagggttttgggcaatttttttttttttttttttttattgtatggttctaaaggaatggttgattacctgtggtttggttttaggtactgggaccctggtcctcgagctgacccctttgaggacatgcggtacgtctgggggggcttcgcctacttgcaggatgtggtggagcaggcaatcatcagggtgctgacgggcaccgagaagaaaactggtgtctatatgcaacagatgccctatccctgttacgttgatgacatgtaagttacctgcaagccactgtttttaaccagtttatactgtgccagatgggggtgtatatatgtgtgtgcatgtgcatgcatgtgtgaatgatctggaaataagatgccagatgtaagttgtcaacagttgcagccacatgacagacatagatatatgtgcacacactagtaaacctctttccttctcatccatggttgccacttttatctttttatttttatttttttttttgagatggagtctcgctctgacgcccaggctggagtgcagtggctcgatctcggctcactgcaacctttgcctcccgggttcaagctattctcctgcctcagcctccacagtagctgggactacaggctcatgctgccacgcccggctgactttttgtattttagtagagacgaggtttcaccatgttacccaggctagacttcaactcctgagctcaggcaatccaccctccttggcctcccaaagtgctgggattacaggtgtgagccactgcacccagcccaccactttaattttttacactctacccttttggtcaaaatttgctcaatctgcaagcttaaaatgtgtcatgacaaacacatgcaagcacatactcacacatagatgcagaaacagcgtctaaacttataaaagcacagtttatgtaaatgtgtgcacttcttctccctaggtggtaaaccacatttcaaaacaacccaaataaaactgaacaaagcttcttcctcttagactttttagaaaatctttcagtgctgagtcactaagctgccaagttctcattgtgggaactatgcctttggatgtaatgatttcttctaagacaatgggcggaggtgtagttattgcagacatctgaaatatgtaatgtttcttccagattctggaaattctcttattctctgtggttggtggtggtggtgggatgtgtgtgtgtgtgtgtgtgtgtgtgtgtgtgtgtgtgtagggatcaggatgcgggaggagctgggttctgcttgtattggttctctgttttgcattgaatagtgtgtttccttgtatggctatctatagcttttcaaggtcaccagaaattatcctgtttttcaccttctaaacaattagctggaatttttcaaaggaagacttttacaaagacccctaagctaaggtttactctagaaaggatgtcttaagacagggcacaggagttcagaggcattaagagctggtgcctgttgtcatgtagtgagtatgtgcctacatggtaaagctttgacgtgaacctcaagttcagggtccaaaatctgtgtgcctttttactttgcacatctgcattttctattctagcttggaatctgaaacattgacaagagctgcctgaaatgtatgtctgtggtgtgattagagttacgataagcaagtcaatagtgagatgaccttggagatgttgaacttttgtgagagaatgagttgtttttttgttttggtttttagtactttaacataatctacctttagtttaagtatcgctcacagttacctagttactgaagcaagcccccaaagaaatttggtttggcaacactttgttagcctcgtttttctctctacattgcattgctcgtgaagcattggatcatacgtacatttcagagtctagagggcctgtccttctgtggcccagatgtggtgctccctctagcatgcaggctcagaggccttggcccatcaccctggctcacgtgtgtctttctttctccccttgtccttccttggggcctccagctttctgcgggtgatgagccggtcaatgcccctcttcatgacgctggcctggatttactcagtggctgtgatcatcaagggcatcgtgtatgagaaggaggcacggctgaaagagaccatgcggatcatgggcctggacaacagcatcctctggtttagctggttcattagtagcctcattcctcttcttgtgagcgctggcctgctagtggtcatcctgaaggtaaggcagcctcactcgctcttccctgccaggaaactccgaaatagctcaacacgggctaagggaggagaagaagaaaaaaaatccaagcctctggtagagaaggggtcatacctgtcatttcctgcaatttcatccatttatagttggggaaagtgaggcccagagaggggcagtgacttgcccaaggtcaacccagccgggtagcagctaagtaggatgagagtgcagggttcatgctttccagataaccacatgctcaactgtgccatgctgtctcattggtagtggttcatggcagcatctgaaagctatttattttcttagatatattgggtggcgattcttcctaagtttctaagaacaataatcagaaggatatatattgttgcaggttagactgtctggaagcagaggctgaaatagagtttgatgtatgggtatttatgagggctcaatacctatggaagagatatggaagatgcaggattgggcagagggaggagttgaactgtgatatagggccaaccccgtggggcactctagagaatatgcagcttgttggagttgttcttcatcgagctgaaacatccagccctttgtgctcccccaaggcctccctcctgacaccacctacctcagccctctcaatcaatcactggatgtgggctgccctgggaaggtcgtgccccagggcctacatggctctctgctgctgtgacaaacccagagttgctgatgcctgaggccgtctactgacagctgggcaacaaggcttccctgaatggggactctgggcagtgcagttttgtgtctgaaccatacattaatatatttatatccgaattttctttctctgcaagcatttcatataaagacacatcaggtaaaaataaatgtttttgaagcaaaaggagtacaaagagataagaactaactaatttaatactagttaccatctgttacaaatagttcctactgattgccaaggactgtttaaacacatcacatgggcttcttcttctatcctcactaacccttttaacagacaaggaaatgaggctcaggaaggtcaaggactttattgaggttccacagtaggatacagttcttgctaaaagcaacccctccctcatgctctgttatctaactgcaaggggaaggtcagtggcagaggtagtggtcccatggttggtgcataagagctgctctgagacaactgcatgctggtgggtcctgcagacatgtacccatcagccggagataggctcaaaatatccacaagagtttggatgattgtgggaatgcagaatccatggtgatcaagagggaaagtcaagttgcctggccattttccttggcttttagacagaaaagttacgtgggatattatctcccacagctcttctgtggtgccaccagtcatagtccttatataaggagaaaccagttgaaattacctattgaagaaacaaagagcaaactcgcccactgaaatgcgtagaaagccctggactctgttgtattcataactctgccattatttttctgcgtagttttgggtaagtcacttatcttctttaggatggtaatgatcagttgcctcatcagaaagatgaacagcattacgcctctgcattgtctctaacatgagtaggaataaaccctgtcttttttctgtagatcatacaagtgagtgcttgggattgttgaggcagcacatttgatgtgtctcttccttcccagttaggaaacctgctgccctacagtgatcccagcgtggtgtttgtcttcctgtccgtgtttgctgtggtgacaatcctgcagtgcttcctgattagcacactcttctccagagccaacctggcagcagcctgtgggggcatcatctacttcacgctgtacctgccctacgtcctgtgtgtggcatggcaggactacgtgggcttcacactcaagatcttcgctgtgagtacctctggcctttcttcagtggctgtaggcatttgaccttcctttggagtccctgaataaaagcagcaagttgagaacagaagatgattgtcttttccaatgggacatgaaccttagctctagattctaagctctttaagggtaagggcaagcattgtgttttattaaattgtttacctttagtcttctcagtgaatcctggttgaattgaattgaatggaatttttccgagagccagactgcatcttgaactgggctggggataaatggcattgaggaatggcttcaggcaacagatgccatctctgccctttatctcccagctctgttggctatgttaagctcatgacaaagccaaggccacaaatagaactgaaaactcttgatgtcagagatgacctctcttgtcttccttgtgtccagtatggtgttttgcttgagtaatgttttctgaactaagcacaactgaggagcaggtgcctcatcccacaaattcctgacttggacacttccttccctcgtacagagcagggggatatcttggagagtgtgtgagcccctacaagtgcaagttgtcagatgtccccaggtcacttatcaggaaagctaagagtgactcataggatgctcctgttgcctcagtctgggcttcataggcatcagcagccccaaacaggcacctctgatcctgagccatccttggctgagcagggagcctcagaagactgtgggtatgcgcatgtgtgtgggggaacaggattgctgagccttggggcatctttggaaacataaagttttaaaagttttatgcttcactgtatatgcatttctgaaatgtttgtatataatgagtggttacaaatggaatcattttatatgttacttggtagcccaccactcccctaaagggactctataggtaaatactacttctgcaccttatgattgatccattttgcaaattcaaatttctccaggtataatttacactagaagagatagaaaaatgagactgaccaggaaatggataggtgactttgcctgtttctcacagarcctgctgtctcctgtggcttttgggtttggctgtgagtactttgccctttttgaggagcagggcattggagtgcagtgggacaacctgtttgagagtcctgtggaggaagatggcttcaatctcaccacttcggtctccatgatgctgtttgacaccttcctctatggggtgatgacctggtacattgaggctgtctttccaggtacactgctttgggcatctgtttggaaaatatgacttctagctgatgtcctttctttgtgctagaatctctgcagtgcatgggcttccctgggaagtggtttgggctatagatctatagtaaacagatagtccaaggacaggcagctgatgctgaaagtacaattgtcactacttgtacagcacttgtttcttgaaaactgtgtgccaggcagcatgcaaaatgttttatacacattgcttcatttaattctcacaaggctactctgaagtagttactataataaccagcaattttcaaatgagagaactgtgactcaaagacgttaagtaaccagctttggtcacacaactgttaaatgttggtacgtggaggtgaatccacttcggttacactgggtcaataagcccaggcgaatcctcccaatgctcacccaattctgtatttctgtgtcctcagagggggtacaactaggagaggttctgtttcctgagtacaggttgttaataattaaatatactagctctaaggcctgcctgtgatttaattagcattcaataaaaattcatgttgaatttttctttagtacttctttcttaatataatacatcttcttgaccaagtccaagaggaacctgcgttggacagttttcatatgagatcaaattctgagagagcaagatttaaccctttttggttcaccttctgatcctcccctaaggaggtatacatgaaatatttattactcctgcctgaacttctttcattgaatatgcaattttgcagcatgcagattctggatttaaattctgagtcttaacttactggctgagggaccttggataggctccttatccctcagtttcctcatctctaaaatggggatggcacctgccccgtgggttgttggaaggacttacagaggtgcagaatgtacgttgtacatagcaggtttcagcaaatgttagctccctctttccccacatccattcaaatctgttccttctccaaaggatgtgtcaaggaggaaatggacctggctgggaaaccctcagaatactgggatgatgctgagcttggctcatacctgtgctttgctttcaggccagtacggaattcccaggccctggtattttccttgcaccaagtcctactggtttggcgaggaaagtgatgagaagagccaccctggttccaaccagaagagaatatcagaaagtaagtgctgttgacctcctgctctttctttaacctagtgctgctgcctctgctaactgttgggggcaagcgatgtctcctgcctttctaaaagactgtgaaaccactccaggggcagagaaatcacatgcagtgtccctttccaaatcctcccatgccatttatgtccaatgctgttgacctattgggagttcacggtctcgatccctgagggacattttctttgttgtcttggcttctagaagagtatcttttacttgccccctcccaaacacacatttcatggtctcctaacaagctagaagaaagaggtaaagacaagcgtgattgtggaaccatagcctcgctgcctgcctgtgacatggtgacctgtgtatcagcctgtgtgggctgagaccaagtggctaccacagagctcagcctatgcttcataatgtaatcattacccagatccctaatcctctcttggctcttaactgcagacagagatgtccacagctcatcaaaggctctgccttctgggttctttgtgcttagagtggcttcctaaatatttaataggtcccttttctgccagtctcttctgtgcccatcccctgattgcccttggtaaaagtatgatgccccttagtgtagcacgcttgcctgctgttcctaatcatcttctcctacctcctctttacacctagctcctgtttcagtcacctagaaatgctcacagtcgctggaatatgtcatgttcttccacacctccatgcctttgtaggtactgtttgctctcacaggagaactttctctctaacttgcctatcttctcaactcctcctttctctccaagatctagttccggatcccctcccctgagcatccctccttggttctcaggtagtcagtcactctctgccctgaacttccatggcacgtgaaagaaaatctttttattttaaaacaattacagactcacaagaagtaatacaaattacatgagggggttcccttaaacctttcatccagtttccccaatggtagcagcatgtgtaactgtagaatagtatcaaaaccatgaaattgacataggtacaattcacaaaccttcttcagatttcactagctttatgtgcgctcatttgtgtgtgtgtgtgcgtatttagttctatgcaattttatcatgtgtgaattcatgtaattactagctcagtcaagctgcagaaatatctcattgtcacaaagctccttcatgctaccccttaatggccacagccacctcccttcttcctcagttcctgacacctgtcaaccactaatgcgttcctcgtttttacagttttattatttctagaatgttacataaatggaaccatacagtaggtatccttttgatactggctttttttttttttcactcagcagtattcccttagatctatccaagttgtgtgtgtcaacagttcattcctcttcactgctgagtagtgttccctgggaggggtgtatcacagttccatggcatttttagatgtattttttaaacagctttcagcatcctctattttaattgttcatcaagtcctttttcccaatagactctgaatgctcctttatcatcgtattcccatcaccaacatcagtacccaaataggccctaaataaacatttatagcctcctgcctgcctgagaaaccagggtggacatggagagaaggcacttctgaaagttcaagcgcagtgccctgtgtccttacactccactcctcagtgctttctgtgggttcatttctgtcttctctcctgtcacagtctgcatggaggaggaacccacccacttgaagctgggcgtgtccattcagaacctggtaaaagtctaccgagatgggatgaaggtggctgtcgatggcctggcactgaatttttatgagggccagatcacctccttcctgggccacaatggagcggggaagacgaccaccatgtaagaagagggtgtggttcccgcagaatcagccacaggagggttctgcagtagagttagaaatttataccttaggaaaccatgctgatccctgggccaagggaaggagcacatgaggagttgccgaatgtgaacatgttatctaatcatgagtgtctttccacgtgctagtttgctagatgttatttcttcagcctaaaacaagctggggcctcagatgacctttcccatgtagttcacagaattctgcagtggtcttggaacctgcagccacgaaaagatagattacatatgttggagggagttggtaattcccaggaactctgtctctaagcagatgtgagaagcacctgtgagacgcaatcaagctgggcagctggcttgattgccttccctgcgacctcaaggaccttacagtgggtagtatcaggaggggtcaggggctgtaaagcaccagcgttagcctcagtggcttccagcacgattcctcaaccattctaaccattccaaagggtatatctttggggggtgacattcttttcctgttttctttttaatctttttttaaaacatagaattaatatattatgagcttttcagaagatttttaaaaggcagtcagaaatcctactacctaacacaaaaattgtttttatctttgaataatatgttcttgtttgtccattttccatgcatgcgatgttaggcatacaaaatacattttttaaagaatactttcattgcaaattggaaacttcgtttaaaaaatgctcatactaaaattggcatttctaacccataggcccacttgtagttatttaccgaagcaaaaggacagctttgctttgtgtgggtctggtagggttcattagaaaggaatgggggcggtgggagggttggtgttctgttctctctgcagactgaatggagcatctagagttaagggtaggtcaaccctgacttctgtacttctaaatttttgtcctcaggtcaatcctgaccgggttgttccccccgacctcgggcaccgcctacatcctgggaaaagacattcgctctgagatgagcaccatccggcagaacctgggggtctgtccccagcataacgtgctgtttgacatgtgagtaccagcagcacgttaagaataggccttttctggatgtgtgtgtgtcatgccatcatgggaggagtgggacttaagcattttactttgctgtgtttttgttttttctttttttcttttttatttttttgagatggagtctcgctctgtagccaggctggactgtagtggcgcgatctcggctcactgcaaccttggcctcccaggttcaagcgattctcctgcctcagcctcccgagtagctgggactctaggcacacaccaccatgcccagctaatttttgtgtttttagtagagacggggtttcaccatgttggccaggatggtctcaatgtcttgacctcgtgatccgcccacctcggtctcccaaagtgctgggaacacaggcatgagccactgtgtctggccacattttactttctttgaatatggcaggctcacctccgtgaacaccttgagacctagttgttctttgattttaggagaagtgggaggtgaatggttgagctgtagaggtgacatcagcccagccagtggatgggggcttgggaaacattgcttcccattattgtcatgctggagggccctttagcccatcctctcccccgccaccctccttattgaggcctggagcagacttcccagacctggtagtgcttcagggccctggtatgatggacctatatttgctgcttaagacatttgctcccactcaggttgtcccatcagccataaggcccccagggagcccgtgtgatggagcagagagagacctgagctctgcaatcttgggcaaggcttttcccttatgtttcttcttatctaaagtgaacagctggggctcatgtgctccctcctcatctaaagtgaacacatggggctcatgtgcagggtcctccccgctttcagagcctgaggtcccctgaggctcaggaaggctgctccaggtgagtgccgagctgacttcttggtggacgtgctgtggggacagcccattaaagaccacatcttggggccctgaaattgaaagttgtaactgcctggtgcatggtggccaggcctgctggaaacaggttggaagcgatctgtcacctttcactttgatttcctgagcagctcatgtggttgctcactgttgttctaccttgaatcttgaagattatttttcagaaattgataaagttattttaaaaagcacggggagagaaaaatatgcccattctcatctgttctgggccaggggacactgtattctggggtatccagtagggcccagagctgacctgcctccctgtccccaggctgactgtcgaagaacacatctggttctatgcccgcttgaaagggctctctgagaagcacgtgaaggcggagatggagcagatggccctggatgttggtttgccatcaagcaagctgaaaagcaaaacaagccagctgtcaggtgcggcccagagctaccttccctatccctctcccctcctcctccggctacacacatgcggaggaaaatcagcactgccccagggtcccaggctgggtgcggttggtaacagaaacttgtccctggctgtgcccctaggtcctctgccttcactcactgtctggggctggtcctggagtttgtcttgctctgtttttttgtaggtggaatgcagagaaagctatctgtggccttggcctttgtcgggggatctaaggttgtcattctggatgaacccacagctggtgtggacccttactcccgcaggggaatatgggagctgctgctgaaataccgacaaggtgcctgatgtgtatttattctgagtaaatggactgagagagagcggggggcttttgagaagtgtggctgtatctcatggctaggcttctgtgaagccatgggatactcttctgttatcacagaagagataaagggcattgagactgagattcctgagaggagatgctgtgtctttattcatctttttgtccccaacatggtgcactaaatttatggttagttgaaagggtggatgcttaaatgaatggaagcggagaggggcaggaagacgattgggctctctggttagagatctgatgtggtacagtatgaggagcacaggcaggcttggagccaactctggctggccctgagacattgggaaagtcacaacttgcctcaccttctttgccgataataatagtggtgcttacctcatagaggattaaattaaatgagaatgcacacaaaccacctagcacaatgcctggcatatagcaagttcccaaataaaatgctactgttcttacctctgtgaggatgtggtacctatatatacaaagctttgccattctaggggtcatagccatacagggtgaaaggtggcttccaggtctcttccagtgcttacccctgctaatatctctctagtccctgtcactgtgacaaatcagaactgagaggcctcacctgtcccacatccttgtgtttgtgcctggcaggccgcaccattattctctctacacaccacatggatgaagcggacgtcctgggggacaggattgccatcatctcccatgggaagctgtgctgtgtgggctcctccctgtttctgaagaaccagctgggaacaggctactacctgaccttggtcaagaaagatgtggaatcctccctcagttcctgcagaaacagtagtagcactgtgtcatacctgaaaaaggtgagctgcagtcttggtgctgggctggtgttgggtctgggcagccaggacttgctggctgtgaatgatttctccatctccaccccttttgccatgttgaaaccaccatctccctgctctgttgcccctttgaaatcatatcatacttaaggcatggaaagctaaggggccctctgctcccattgtgctagttctgttgaatcccgttttccttttcctatgaggcacagagagtgatggagaaggtccttagaggacattattatgtcaaagaaaagagacttgtcaagaggtaagagccttggctacaaatgacctggtgttcctgctcattacttttcaatctcattgaccttaacttttaaactataaaacagccaatatttattaggcactgatttcatgccagagacactctgggcatgaaagaaagtaatgataatagttaattttatatagcgttgttaccatttacaacctttttttttttttaacctctatcatctcaattaaagtgcagagagaccctgggaagaaggtaactatatttattatcccagatgagggaagtgaggcttgtagggaattggtagctgattcaaggtcacccagcaggtaaataacagtggtgggaccagacccaattaccaggtatgttttcctctgtaccgcagtacatgcctgagatttatttgtgtgttgaagccagtggtacctaatgtatttacatcccaacctgaaactcctatccacttatttaccttttaatgagcctcttaactcaagtgcagtctgaggaccagcagcatcaggatcacttgggaacttgttagaaattcagcaacctgggcccagctcagacctaccgaatcagaatctgtgcattttaacaaggttcttgagtggttgaacacacattaaagcatgagaagcattgaactagacatgtagccaggtaaaggccttgcctgagatggttggcaaaggcctcattgcagcattcattggcaggccacagttcttttggcagctctgcttcctgacctttcaccctcaggaagcgaggctgttcacacggcacacacatgccagacagggtcctctgaagccacggctgccagtgcatgtgtcccagggaaagctttttcctttagttctcacacaacagagcttcttggaagccctccccggcgaaggtgctggtggctctgccttgctccgtccctgacccgttctcacctccttctttgccatcaggaggacagtgtttctcagagcagttctgatgctggcctgggcagcgaccatgagagtgacacgctgaccatcggtaaggactctggggtttcttattcaggtggtgcctgagcttcccccagctgggcagagtggaggcagaggaggagaggtgcagaggctggtggcgctgactcaaggtttgctgctgggctggggctgggtggctgcgggtgtgggagcagcttggtggcgggttggcctaatgcttgctggggtgcctggggctcggtttgggagctagcagggcagtgtcccagagagctgagatgattggggtttggggaatcccttaggggagtggacactgaataccagggatgaggagctgagggccaagccaggagggtgggatttgagcttagtacataagaagagtgagagcccaggagatgaggaacagccttccagatttttcttgggtagcgtgtgtaggaggccagtgtcaccagtagcatatgtggaacagaagtcttgacccttgctatctctgcctagtcctaatggctggcttttcccaggaaggcttctgcttccatggactgttagattaaccctttatttaggtaaatgagggaacctactttataagcataggaaagggtgaagaatcttttaagattcctttactcaagttttcttttgaagaatcccagagcttaggcaatagacaccagactttgagcctcagttatccattcacccatccacccacccacccacccatccttccatcctcccatcctcccattcacccatccacccatccagctgtccacccattctacactgagtacctataatgtgcctggctttggtgatacaaaggtgaataagacatagtcctttcctttgcccccaaccctcagaccagagatgaacatgtggaatgacctaaacacctggaacaggtgtggtgtatgagcggcaggcctctgatgagagggtgggggatggccagccctcactccgaagcccctctgagttgattgagccatctttgcattctggtccctgcagatgtctctgctatctccaacctcatcaggaagcatgtgtctgaagcccggctggtggaagacatagggcatgagctgacctatgtgctgccatatgaagctgctaaggagggagcctttgtggaactctttcatgagattgatgaccggctctcagacctgggcatttctagttatggcatctcagagacgaccctggaagaagtaagttaagtggctgactgtcggaatatatagcaaggccaaatgtcctaaggccagaccagtagcctgcattgggagcaggattatcatggagttagtcattgagtttttaggtcatcgacatctgattaatgttggccccagtgagccatttaagatggtagtgggagatagcaggaaagaagtgttttcctctgtaccacagtacatgcctgagatttgtgtgttgaaaccagtggtacctaacacatttacatcccaaccttaaactcctatgcacttatttaccctttaatgagcctctttacttaagtacagtgtgaggaacagcggcatcaggatcacttgggaacttgttagaaattcagcaacttgggcccagctcagacctactgaatcagaatcaggagcaattctctggtgtgactgtgtcacagccaggtatcaactggattctcatacataggaaatgacaaacgtttatggatggatagtctacttgtgccaggtgctgagatttgttttttgttttttgatttttttttaatcactgtgacctcatttaattctcaaaaaaagatgaaaaaatgaacactcaggaatgctgacatgagattcagaatcaggggtttggggcttcaaagtccatcctctctttatccatgtaatgcctccccttagagatacaacatcacagaccttgaaggctgaaggggatataaaagctgtctggccaagtggtctccaagcttgacagtgcagcagaatcacctggggatattattaaaaataaacatactaaggtttggcttcagggcctgtgaatcagaatttctggaggtgaggccttgaagtctgtatttctattgcatactttggacacagtggtctatagactagagtttggaaatgattgcgctcattcagattctcttctgatgtttgaattgctgccatcatatttctagtgctctatttcctcctgctcattctgtcttggataacttatcatagtactagcctactcaaagatttagagccacagtcctgaaagaagccacttgactcattccctgtaggttcagaataaatttcttctgcgcagtgtctgtcatagctttttttaaatttttttttatttttgatgagactggagttttgctcttattgcccaagctggagtgcagtggtgcgattttggctcactgcaacctccacctcccaggttcaagcgattctcctgcctcagcctcccaagtagctgagattacaagcatgtgctaccacgcccagctaattttgtatttttagtagagatgggttttatccatgttggtcaggctggtctcgagctccagacctcaggtgatctgcccgcctcggcctcccaaagtgctgggattataggcctgagccacagcgctcagccataactttaatttgaaaatgattgtctagcttgatagctctcaccactgaggaaatgttctctggcaaaaacggcttctctcccaggtaactctgagaaagtgttattaagaaatgtggcttctactttctctgtcttacggggctaacatgccactcagtaatataataatcgtggcagtggtgactactctcgtaatgttggtgcttataatgttctcatctctctcattttccagatattcctcaaggtggccgaagagagtggggtggatgctgagacctcaggtaactgccttgagggagaatggcacacttaagatagtgccttctgctggctttctcagtgcacgagtattgttcctttccctttgaattgttctattgcattctcatttgtagagtgtaggtttgttgcagatggggaaggtttgttttgttgtaaataaaataaagtatgggattctttccttgtgccttcagatggtaccttgccagcaagacgaaacaggcgggccttcggggacaagcagagctgtcttcgcccgttcactgaagatgatgctgctgatccaaatgattctgacatagacccaggtctgttagggcaagatcaaacagtgtcctactgtttgaatgtgaaattctctctcatgctctcacctgttttctttggatggcctttagccaaggtgatagatccctacagagtccaaagagaagtgaggaaatggtaaaagccacttgttctttgcagcatcgtgcatgtgatcaaacctgaaagagcctatccatatcacttcctttaaagacataaagatggtgcctcaatcctctgaacccatgtatttattatcttttctgcggggtcctagtttcttgtatacattaggtgtttaattgttgaacaaatattcattcgagtagatgagtgattttgaaagagtcagaaaggggaatttgctgttagagttaattgtaccctaagacttagatatttgaggctgggcatggtggctcatgccagtaatcccagcgctttgagaggctgaggtgggtagatcacctgaggtcaggagtttgagaccagtctgaccaacaaggtgaaaccccgtctctactaaatacaaaaaattagccgagtgtggtggcacatgcctgtcatcccagctacttgggaggctgaggcaggagaatcgcttgaacccaggaggcagaggttgcagtcagccacggttgcgccattgcactccagactgggcaacaagagtgaaaactccatctcaaaaaagaaaaaaaaagaattagatattttggatgagtgtgtctttgtgtgtttaactgagatggagaggagagctaagacatcaaacaaatattgttaagatgtaaaagcacatcagttaggtatcattagtttaggacaaggatttctagaaaatttttaggaacagaaaactttccagttctctcacccctgctcaaagagtgtatggctcttacattatatataactgcctgacttcatacagtatcagtacttagatcatttgaaatgtgtccacgttttaccaaaatataatagggtgagaagctgagatgctaattgccattgtgtattctcaaatatgtcaagctacgtacatggcctgtttcatagagtagtctataagaaattgatgacttgattcatccgaatggctggctgtaacacctggttacgcatgaacacctcttttcagttgtctcaagacacctttcttttctgtacttatcagacaaggactgaaaggcagagactgctactgttagacattttgagtcaagcttttccttggacatagctttgtcatgaaagccctttacttctgagaaacttctagcttcagacacatgccttcaagatagttgttgaagacaccagaagaaggagcatggcaatgccgaaaacacctaagataataggtgaccttcagtgttggcttcttgcagaatccagagagacagacttgctcagtgggatggatggcaaagggtcctaccaggtgaaaggctggaaacttacacagcaacagtttgtggcccttttgtggaagagactgctaattgccagacggagtcggaaaggattttttgctcaggtgagacgtgctgttttcgccagagactctggcttcatgggtgggctgcaggctctgtgaccagtgaaggcaggatagcatcctggtcaagatatggatgccggagccagatttatctgtatttcaatcccagttctattccttgccagttgtgtatccgctggcaagttacttctctatgcctcaatctcctcatctgtaaaatggggataataatattacctgcaatacagggttgttacgaaaataaaaatgaataggtgcttagaatggggcctgacattagtaagtgcttagttttgtgtgtgtatatgttatttttattttggaggagaacataaaaaggacaaagtgtagaaaaactggttgggtgtattcagctgtcataacatgagagttgttatgcccagatgcacttgacatgtgaatttattagaaacatgatttttctctgagttgatgtttaactcaaactgatagaaaagataggtcagaatatagttggccaacagagaagacttgttagactattgtctgcatgtcagtgtttgcatgctaacttgcttagttagaaaggttaaattttttcactctataaaatcaagaaatatagagaaaaggtctgcagagagtctttcatttgatgatgtggatattgttaagagcgggagtttggagcatacagagctcaagttgaatcctgactttgctacttattggctatatgaccttgggcaagctgcttagtctctctgatcctcagttacctttgtttgttgatgatgaccattgataacacaaccataaataatgacaacatagagatagttctcattatagtagttgttatacagaattattcactcaatgttaattttctgcattgaaatcccagaacattagaattgggggcattatttgaatctttaaggttataaggaatacatttctcagcaataaatggaaggagttttgggttaacttataaagtatacccaagtcatttttttttcagagaagatatggtagaaagtcttaggaggttgaagaaggaattggatatttattctttctgagactatcatgggagataatgactatggttgtccatgattggagccgttgctgtagagttggttttattatagtgtaggatttgaatgggccatgtgttctcagacctcagattaaaatgagaaaactgaggccagtggggagcgtgacttcacatgggtacacttgtgctagagacagaaccaggattcaggacttctggctcctggtcctgggttcatggcccaatgtagtctttctcagtcttcaggaggaggaagggcaggacccagtgttctgagtcaccctgaatgtgagcactatttacttcgtgaacttcttggcttagtgcctctgccaggtggccataacctctggccttgtgttgccagagaaaaggtttagttttcaggctccattgcttcccagctgccaagaatgccttggtgcagcacagtcataggccctgcattcctcattgccgtgctggttggtcggggaggtgggctggactcgtagggatttgccccttggccttgtttctaacacttgccgtttcctgctgtccccctgccccctccactgcctgggtaaagattgtcttgccagctgtgtttgtctgcattgcccttgtgttcagcctgatcgtgccaccctttggcaagtaccccagcctggaacttcagccctggatgtacaacgaacagtacacatttgtcaggtatgtttgtcttctacatcccaggagggggtaagattcgagcagaccaaagatgtttacgagggccaagggaatggacttcagaattacacggtggaatgaattttactgctgcggctcaggtccctgtataagctaatactgcatgcatagaacagcagcgaactaaccctgaataataggccagtcttctgttgagcctttcagcctctctcctcttcatcctactgttgtcaggaacagccacatgtgttttaggtgaaataatccacccttgcaaaaatccatgattaagttataaaatatttggatttgtggagctgtgttttaattctgtaactgagtcacagggcacactgtcaaagcatagaacctccagagacttgttttctgcaaagtataattcatgtaattattatctattctgttatatttgggatgttaggtagtgtttgttctttagataaaaatatcccccactctgtaacaatacattaaatcaaagaaaaggacaaaggatttttctgggtcttgttagcaggagctttcttcagtcctgaaagatttgtagacctgtagatgggggaactgtgtcagtgatacaaaagggaagcatttaaaaaaaaaaaagtatatatatatatatatatatatatatgtaatgtgaattggcctctttttctctaagcccacattttcttcttacatagttcaggtttactttattttttcctttccggctgctgaccctgtattgcccgtagttgtggaacatagcatgtgtttgtgacctgtgcctgttatttttgtgctttctagttgtgcatgcaaagagtacaaagttttcttgccctttcttggaaaatcctgcttgtctgtgccaaagggataattgtgaaagcacttttgaaatacttaatgagttgattttcttcaaattaaaaaaaatatataaatgtatatgtgtatgtacatgtgtgtacacatacacacctttatacatacagcccatttaaaacaagctccactttggagtgctctacgtcaccctgatgccgaatacagggccagagtctgagatccttctgggtggtttctgtgttttgttcatttctgttttaagagcctgtcacagagaaatgcttcctaaaatgtttaatttataaaaacatttttatctctcgattactggttttaatgaattactaagctggctgcctctcatgtacccacagcaatgatgctcctgaggacacgggaaccctggaactcttaaacgccctcaccaaagaccctggcttcgggacccgctgtatggaaggaaacccaatcccgtgagtgccactttagccataagcaggcttcttgtgcttgttgcctggtttgatttctaatatgctgcatttatcaactgcatgccacattgtgaccgccagcatttgccctttgaattattattatgttttatttacaaaaagcgaaggtagtaaccgaactaaattatctaggaacaaacgtttggagagtcttctaacaccgtgcaaagcacgtcattacagacatttgtttactgatttagaaccttaatatttaatttaaatagcactttacacttactgatgaaatgcttttcctttctttctctcccagcccctgtacttaagtgcttcaataggctctcattatatatgatttttaggttttgtttatcagcttcttcgcttttataatctgaaaagatggcatatgaatttttataaaaagggacactttcttcttctcaaattgtatatttttattgtactttccttcaaaacccccttttaaaaagtaagcagtagataaataaattcagtgaagcatccatatgactcttaagtgagtgtaggggaagggaggtcaccagatcactgtgagtgaagatggtggagaggtgaggatcttatgaggccgtgctcaaggctggtagaggtgggttagtgtttccaggtttaggcagaatctcagctgaggtcatgaaacaacagtgatctctgaaaaattatggcaaggtgggaaggtgctggagaattggagagggggcaaacttgactttcaagtttcaatgggaagataggtgactctgcacaccacagaacagtgagcatgataacctgtttatacaaggttctagagcagatttctaaatggatagctactgtgtgcttgtttgttcttaattagtattggatagttactaaatacttgttagtacttagtacataatgggtggtaaatcctagcagctaatattggttcccaaataaccagatgacaaggatagagaaggacacagacacggcctatctggatttcatggtgcctttgattttccacatgaaggttgtgtagggaagatagaagcatgagatgagatgataatatagttatctggattcatcactggccagctgaaccatatgaactcatggattgatgctagcttaggaaggctctgtaggagccagaactgggctgagagccagcccatagagacaaaagaggcccggccctgacatcagagggttcaaacatgatgtctgagccccacctacagtctgccggaggtggttggaaggaagagcctttatccttacaattcttactgaaattcaaatttttaggttttgcaaaaaaatggtggacctgaaggaaatttgacaggagcatgtctcagctgtatttaaatttgtctcagccaatccccttttgaatgttcagagtgtaagcttcaggagggcagcgcgtcttagtgtgacttttctggtcagttcaggtgctttaaggagacaattagagatcaatctggaaaacttcatttgaatttttaatacataagaaaacaataagaaatagttaaaaatatatatttatataatatatatgtgtgtgtgtgtgtgtgtgtgtatatatatatatatattttatttatttatttttttttgagatggagtctcgctctgttgcccaggctggagtgcagtggctcaatcttggctcactgccacctctgcctcccaggttcaagtgattctcctacctcagcctcctgagtagctgggattacaagcatgtgccaccacactggctaatttttctaattttagtagagatggagtttcaccatgttggacaggatggtcttgaactcctgacttagtgatccacccgccttcgcctcccaaagttctgggattacaggcatgagccatcgtgcctggcaattatatttaatatttaataataaggaaataattgctgtaactttactttaaattgtggaattctgaaactggaagggaactggaaatgacttgttgaatcaaatcattttaaacttttattttgccagtggaaaaaataagcccccaaaagagcaggggacctgctgatgtcccacagtaattcagagctggagatgaggttgaaggctttgtgtcttatctccagggaaaatttgtagacagcgtagctctttatgtgacgagcattctcaccccagtcatcccccaattctctactcatttgagaacataaattggatcttgccagtctctactcatttttcagcacatcgagcataagatccagactctttcccaggcctctctcatctggctcctctcctcctcctttatcattactcttcttcgtagcttatcctactccagccatgctgtcttcctattattcctaaaaagtagaaatgcatttcttcctagggcctttgtacctgcacttgccatcgcttttgctcagaatgttctttttgccaagcttttgcccagcttgttctccatcattgttatgttttggctgaaatgtcttctcttagtaggttcattctccccagtcactgtctttttattttgctttattttgggccatctaaggttatcttattagtgtatttgttgttcgtctcctccatgggcatacacctccatgaaggcaggtattttcaccttaggccctcgaatatactggacagcatctggcacgtagtagatgctcaacgaatgtttgttgtgtgagcaaatggttggttgattggattgaactgagttcagtatgtaaatatttagggcctctttgcattctattttacttatgtataaaatgatacataatgatgatataaatgatgtcacagtgtacaaggctgttgtgggatcaagcaatcaaatgagatcatgcttgtcttttccaaatggtgagggaatagatgcatgtttgtggttgttacggaatgatcctgtgctcctgaggcaacagaaaggccaggccatctctggtaatcctactcttgctgtcttccctttgcagagacacgccctgccaggcaggggaggaagagtggaccactgccccagttccccagaccatcatggacctcttccagaatgggaactggacaatgcagaacccttcacctgcatgccagtgtagcagcgacaaaatcaagaagatgctgcctgtgtgtcccccaggggcaggggggctgcctcctccacaagtgagtcactttcagggggtgattgggcagaaggggtgcaggatgggctggtagcttccgcttggaagcaggaatgagtgagatatcatgttgggagggtctgtttcagtcttttttgttttttgtttttttttctgaggcggagtcttgctctgtcgcccaggctggagtgctgtggcatgatcttgcctcactgcaacctccacctcccaggttcaagcgattctcctgcctcagcctcctgagtagctgggattacaggcacgcaccaccatgtctggctaatttttgtgtttttagtagagatagggtttcgccgtgttggctaggctggtctggaattcctgacctcaggtgatccacccgcctcggcctcccaaagtgctgggattacaggcgtgagccactacgcccagccctgtttcagtctttaactcgcttcttgtcataagaaaaagcatgtgagttttgaggggagaaggtttggaccacactgtgcccatgcctgtcccacagcagtaaagtcacaggacagactgtggcaggcctggcttccaatcttggctctgcaacaaatgagctggtagcctttgacaggcctgggcctgtttcttcacctctgaattagggaggctggaccagaaaactcctgtggatcttgtcaactctggtattcttagagactctgtttgggaaggagtcctgagccattttttttttcttgagaatttcaggaagaggagtgcttatgatagctctctgctgcttttatcagcaaccaaattgcaggatgaggacaagcaattctaaatgagtacaggaactaaaagaaggcttggttaccactcttgaaaataatagctagtccaggtgcggggtggctcacacctgtaatctcagtattttgggatgccgaggtggactgatcacctaaggtcaggagttcgaaaccagcttggccaatgtggcgaaaccctgtctctactaaaaattcaaaaattagccaggcatggtggcacatgcctgtaatcccagttacttgggaggctgaagcaggagaattgcttgaacctgggaggtggaggtcgcagggagccaaaattgcgccactgtactccagcctgagcaacacagcaaaactccatatcaaaaaataaaatgaataaaataacagctaatctagtcatcagtataactccagtgaacagaagatttattaggcatagtgaatgatggtgcttcctaaaaatctcttgactacaaagaatctcatttcaatgtttattgtttagatgttcagaataaattcttgggaaagaccttggcttggtgtaagtgaattaccagtgccgagggcagggtgaaccaagtctcagtgctggttgactgagggcagtgtctgggacctgtagtcaggtttccggtcacactgtggacatggtcactgttgtccttgatttgttttctgtttcaattcttgtctataaagacccgtatgcttggttttcatgtgatgacagagaaaacaaaacactgcagatatccttcaggacctgacaggaagaaacatttcggattatctggtgaagacgtatgtgcagatcatagccaaaaggtgactttttactaaacttggcccctgccttattattactaattagaggaattaaagacctacaaataacagactgaaacagtgggggaaatgccagattatggcctgattctgtctattggaagtttaggatattatcccaaactagaaaagatgacgagagggactgtgaacattcagttgtcagcttcaaggctgaggcagcctggtctagaatgaaaatagaaatggattcaacgtcaaattttgccacttagtagcaacttgaccaggtaactggttatccttttaaagccttagtttatctaaattgtgatattaatgttgctcttataagtttgtcatgaggactaaattaaatggtgtacatagagtgccttgggtactctctgatgggggactccatgataatttgtggtctcatggagggagctctgggaaggtttaggagcctgccttggctctgcagccttgggagagccttctagcttcccaggacatggcagcctagtgttgaatgcttggctcagcaaatgtttgttctcgtttccttcccatcaacttggtcagttggggtctttcagttaggagtatctcagtgactttaaatggcatgggcatgctggagtgatagtgaccatgagtttctaagaaagaagcataatttctccatatgtcatccacaattgaaatattattgttaattgaaaaagcttctaggccaggcacggtggctcatgcctgtaatcccagcactttaggaggccaaggcgggtggatcacttgaggtcaggagtttgagaccagcctggccaacatggggaaaccctgtctctactaaaaatacaaaataagctgggcgtggtggtgcgtgcctgtaatcccagctacttgggaggctgaggcaggagaattgcttgaatctgggaggcggaggttgcagtgagctgagttcatgccattgcattccagcctgggcaacaagagcgaaaccatctcccaaaagaaaaaaaaaagaaagaaaaagcttctagtttggttacatcttggtctataaggtggtttgtaaattggtttaacccaaggcctggttctcatataagtaatagggtatttatgatggagagaaggctggaagaggcctgaacacaggcttcttttctctagcacaaccctacaaggccagctgattctagggttatttctgtccgttccttatatcctcaggtggatatttactccttttgcatcattaggaataggctcagtgctttctttgaactgattttttgtttctttgtctctgcagcttaaagaacaagatctgggtgaatgagtttaggtaagttgctgtctttctggcacgtttagctcagggggaggatggtgttgtaggtgtcttggattgaagaaagccttggggattgtttgtcactcacacacttgtgggtgccatctcactgtgaggaggacagaagccctgtgaacatgtggagcacacaggggcacagacagatttagattaggcctgctttatagagtttctgcctagagcatcatggctcagtgcccagcagcccctccagaggcctctgaaatatttgatatactgatttccttgaggagaatcagaaatctcctgcaggtgtctagggatttcaagtaagtagtgttgtgaggggaatacctacttgtactttccccccaaaccagattcccgaggcttcttaaggactcaaggacaatttctaggcatttagcacgggactaaaaaggtcttagaggaaataagaagcgccaaaaccatctctttgcactgtatttcaacccatttgtccttctgggttttgaaggaacaggtgggactggggacagaagagttcttgaagccagtttgtccatcatggaaaatgagataggtgatgtggctacgtcagggggcccgaaggctccttgttactgatttccgtcttttctctctgccttttccccaagggccaggacccctggatctctgggcagagcagacgcaggcccctataatagccctcatgctagaagggagccggagcctgtgtataaggccagcgcagcctactctggacagtgcagggttcccactctcccaactccccatctgcttgcctccagacccacattcacacccgagccactgggttggaggagcatctgtgagatgaaacaccattctttcctcaatgtctcagctatctaactgtgtgtgtaatcaggccaggtcctccctgctgggcagaaaccatgggagttaagagattgccaacatttattagaggaagctgacgtgtaacttctgaggcaaaatttagccctcctttgaacaggaatttgactcagtgaaccttgtacacactcgcactgagtctgctgctgatgatactgtgcaccccactgtctgggttttaatgtcaggctgttcttttaggtatggcggcttttccctgggtgtcagtaatactcaagcacttcctccgagtcaagaagttaatgatgccaycaaacaaatgaagaaacacctaaagctggccaaggtaaaatatctatcgtaagatgtatcagaaaaatgggcatgtagctgctgggatataggagtagttggcaggttaaacggatcacctggcagctcattgttctgaatatgttggcatacagagccgtctttggcatttagcgatttgagccagacaaaactgaattacttagttgtacgtttaaaagtgtaggtcaaaaacaaatccagaggccaggagctgtggctcatgcctgtaatcctagcactttgggaggctgaagcgggtggatcacttgaggtcaggagttcgagaccagcctggcctacatgacaaaaccccgtatctactaaaaatacaaaaaaattagctgggcttggtggcacacacctgtaatcccagctacttgggaggctgaggcaggagaattgcttgaaccctgtaggaagaggttgtagtgagccaagatcgcaccgttgcactccagcctgggcaacaagagcaaaactccatctcaaaaaacaaattaaatccagagatttaaaagctctcagaggctgggcgcggtggcttacacctgttatcccagcattttgggatgccgaggcgggcaaagcacaaggtcaggagtttgagaccagcctggccaacatagtgaaaccctgtctttgctaaaaacatagaaaaattagccgggcatggtggcgtgcgcctgtaatcccagctactcgggaggctgaggtgagagaattgcttgaacccgggaggcggaggttgcagtgagcccagattgcaccactgcactccagcctgggcgacagagcaagactccatctcaaaaaaagctctcagaacaaccaggtttacaaatttggtcagttggtaaataaactgggtttcaaacatactttgctgaaataatcactgactaaataggaaatgaatctttttttttttttttttaagctggcaagctggtctgtaggacctgataagtactcacttcatttctctgtgtctcaggtttcccatttttaggtgagaattaaggggctctgataaaacagaccctaggattgtggacagcagtggtagtcctagagtccacaagtctgcttttgagtgatgggcccatgtatctggcacatctgcaggcagagcgtggttctggctcttcagatgatgccggtggagcactttgaggagtcctcaccccaccgtgataaccagacattaaaatcttggggctttgcatcccaggatttctctgtgattccttctagacttgtggcatcatggcagcatcactgctgtagatttctagtcacttggttctcaggagccgtttatttaatggcttcacatttaatttcagtgaacaaggtagtggcattgctcttcacagggccgtcctgttgtccacaggttccagattgactgttgccccttatctatgtgaacagtcacaactgaggcaggtttctgttgtttacaggacagttctgcagatcgatttctcaacagcttgggaagatttatgacaggactggacaccagaaataatgtcaaggtaaaccgctgtctttgttctagtagctttttgatgaacaataatccttatgtttcctggagtactttcaactcatggtaaagttggcaggggcattcacaacagaaaagagcaaactattaactttaccagtgaggcagtacggtgtagtgtagtgattcagagaatttgctttgccaccagacataccaggtaaccttgactaagttacttaacctatctaaacctcagtttcctcatctgtgaaatggagacagtaatcatagctatttccaaactgttgtgagaattcaatgagttaaaggtataaggtcctcaccacagcgcctgcccacatagtcagtgatcactatgtcctgaacactgtaattacttcgccatattctctgatcatagtgttttgccttggtatgtgactagaatttctttctgaggtttatgggcatggttggtgggtatgcacctgcctgcaggagcccggtttgggggcattaccttgtacctggtatgttttctttcaggtgtggttcaataacaagggctggcatgcaatcagctctttcctgaatgtcatcaacaatgccattctccgggccaacctgcaaaagggagagaaccctagccattatggaattactgctttcaatcatcccctgaatctcaccaagcagcagctctcagaggtggctcygtaagtgtggctgtgtctgtatagatggagtggggcaagggagagggttatggagaaggggagaaaaatgtgaatctcattgtaggggaacagctgcagagaccgttatattatgataaatctggattgatccaggctctgggcagaagtgataagtttacgaattggctggttgggcttcttgaactgcagaagagaaaatgacactgatatgtaaaaatcgtaacatttagtgaattcatataaagtgagttcaaaaattgttaattaaattataatttaattataagtgtttaatcagtttgatttgtttaaaaaccactgttttaaatttggtggaatatgtttttattagcttgtatctttaattcctaaattaagctgtgtgtgtgtgtgtgtgtgtgtgtgtgtgtgtgtgtgtgtgtgtgtgtgtgaagtttaaagccaggatgagctagtttaaagtatgcagcctttggagtcatacagatctgggtttgaatctggtctctaaactttatagatgtatgatattaaatgaggcagttcatgtaaattgccaagcccagcactcagcacagagttgatatttcacacacattagatacctttcctgtatgtggagcatggcagttcctgtttctgctttactcctacaggatactaatataggacactaggatctttataccaagaccccatgtaatgggcttatgagaccattcttcttataaaaatctgacagaatttttgtatgtgttagatcaataggctgcatactgttattttcaagttgatttacagccagaaatattaatttatttgagtagttacagagtaatatttctgctctcatttagttttcaagccccactagtcctttgtgtgtgaaaatttacaacttactgctcttacaaggtcatgaacagtggaccaaagtgaatgccattaaccactctgacttccttcattagttttattgtgacagtggactcttttgacctcagtaataccagtttggcatttacattgtcatatttttagacttaaaaatgatcatcttaaccctgaataaaatgtgtctggtgaacagatgtttttccttgggctgtgcctcagatatctctgtgtgtgtgtacgtgtgtgtttgtctgtgtgtccatgtcctcactgattgagccctaactgcatcaaagacccctcagattttcacacgctttttctctccaggatgaccacatcagtggatgtccttgtgtccatctgtgtcatctttgcaatgtccttcgtcccagccagctttgtcgtattcctgatccaggagcgggtcagcaaagcaaaacacctgcagttcatcagtggagtgaagcctgtcatctactggctctctaattttgtctgggatatggtaaggacacaggcctgctgtatctttctgatgtctgtcagggccatggattgatatggataagaaagaaagagctctggctatcatcaggaaatgttccagctactctaaagatgtatgaaaaagaaatagccagaggcaggtgatcactttcatgacaccaaacacagcattgggtaccagagttcatgtcacaccagagggaaaattctgtacacaatgatgaaaattaataccactaccacttaagttcctatgtgacaactttcccaagaatcagagagatacaagtcaaaactccaagtcaatgcctctaacttctctgatgggttttaacctccagagtcagaatgttctttgccttactaggaaagccatctgtcatttgaaaactctgtacattttatcagcagcttatccatccattgcaaatatgtttttgtgccagccacaatatattgcttctatttggaccaatatgggggatttgaaggaattctgaagttctaattatatttcaactctactttacaatatctccctgaaatatatctccctgtaacttctattaattataagctacacagagcaaatctaattcttctcccaccgaacaagtccctggatatttaaaaataactctcatactctcatttaacctgagtattacccagataagatgatatatgagaatacaccttgtaacctccgaagcactgtacaaatgtgagcaatgatggtggagatgatgatgagatctttgctgtttataccaagccccttagactgtgtcactcttctgatccggttgtccttgtatggccatgctgtatattgtgaatgtcccgttttcaaaagcaaagccaagaattaaccttgtgttcaggctgtggtctgaatggttatgggtccagagggagttgatctttagctcacacttctattactgcagcacaaagattttgcattttggaaggagcaccgtcttactggcaacttagtggtaaaccaaaacctccatttcacacaaatgattgtgaaattcgggtctccttcattctatacaaattcatttgatttttttgaaactaaactttatatttatccatattaaattacatgggttttatttttgttttatcttgattcagtaattactcctttcagtaaacacagactgagtgctgtgtgtctgacttatgccaggcataggtgattcagagatgaaaggtcaagtccctgaacccatctcttgtcttcctgggtattatctgtccctccctgctttagagctcctgaaatttgctagaagcatgtcttcatctaagttgttgataaacacatcaagtaggattggactgaggcagagccctgtagtctgaagctgcagttcttctagcggctgacaagccccactatcacttccctgctggtgctttgctctgccagctgtgaattctcataattgtcctatcgtcaagtctttatttctgcattttactgcttgatacactgtcaggacagactttaaaattattctcagtgcgatgaaacaattctgacattcatgttatgagcagttacctcataaatagattacatgtgagattgaacttgggcagactataatatagcattaatgatgaaacagacacagtcatcttcgggaagaagaatagaggcttatttgctgcctgtgaaattaaaattactctgactgggaatccatcgttcagtaagtttactgagtgtgacaccttggcttgactgttggaaagacagaaagggcatgtagtttataaaatcagccaaggggaaaatgcttgtcaaaatgtattgtcgggtattttgattaatagtttatgtggcttcattaattcagagttactctccaatatgtttatctgccctttcttgtctgataatggtgaaaacttgtgtgatgcattgtatatttgatttaggggtgaactggatgtctttgttttcacttttagtgcaattacgttgtccctgccacactggtcattatcatcttcatctgcttccagcagaagtcctatgtgtcctccaccaatctgcctgtgctagcccttctacttttgctgtatgggtaagtcacctctgagtgagggagctgcacagtggataaggcatttggtgcccagtgtcagaaggagggcagggactctcagtagacacttatctttttgtgtctcaacaggtggtcaatcacacctctcatgtacccagcctcctttgtgttcaagatccccagcacagcctatgtggtgctcaccagcgtgaacctcttcattggcattaatggcagcgtggccacctttgtgctggagctgttcaccgacaatgtgagtcatgcagagagaacactcctgctgggatgagcatctctgggagccagaggacagtgtttaattgtgatcttattccacttgtcagtggtattgacactgctgactgccttgtcctgtcttcagagtctgtcttccctgagaaggcaaagcacctttctttcttgctgtgccttacattttgctggtcaagcctttcagtttcttttgacagttttttttacttctttcttttttcaatgttgctcttaccaagagtagctcctctgccttccactttacacatgagagctgggcgacgccattcagtcctaaggcttttaccatcacctctcttggtgtttttattgtcatctctaagatcaatgcctttagccttgatcataaccttgaactctaatctcaaattctcacttgcctagtggattgctccatttagatagtatatagataccccaacctggacatgtcctagttttctttccccttggaacttaatgcttttcttgccatccctgtcacactcagtggcactaccatccactcggttgcccaagctggctcttagagttatcctagatgcttgctttgctgttgcagatttcccacattcaactggttatgttgtcagttcttccaggtatggacctctaaaataaggcttcctctccattccggttgtcattgcctttgtccaaacacagcacacaaggccttttacagttgcacaactcttcctgtccatacccaccacaccctttcccagctgtaagctttattcattatttctccatactcagagcatttctccagattttctaaagaatagaattttattgctacatatcatcagctatgcctgctgctatttaattggtatctgaattaaaaggtctggtttgtccctagagaatcaaattttttcttcactcccatatttcagaacttgatacatttttaggataaaccatgaatgacacccgtttcttctccctcaccctcccttccctcccatttttttttttttttttttttagaagctgaataatatcaatgatatcctgaagtccgtgttcttgatcttcccacatttttgcctgggacgagggctcatcgacatggtgaaaaaccaggcaatggctgatgccctggaaaggtttggtgagtgaagcagtggctgtaggatgctttaatggagatggcactctgcataggccttggtaccctgaactttgttttggaaagaagcaggtgactaagcacaggatgttcccccacccccatgcccagtgacagggctcatgccaacacagctggttgtggcatgggttttgtgacacaaccatttgtctgtgtctctgatagcattgagaaaagtgaaagggcagttttgaaggtaaggaaaatagtgttatttgcttggatccactggctcatgccactgtctgggttggttagaagcactggaaaagtcaaaccataactttgagaattaggtgatcagggaatcagaaggaaagatgcaaactttggctcttttaggcgaatcatgtgcctgcagatgaggtcatttattatcttttacacagtctataaaattataatgtattacatctttttctacctttagaatggttaaaaatatttctccggtagccatatgattattattcatccattagataatatagtcaaatgggccatgttatttactgttcatagaagaggggctttttgcaacttgggctacaaaggagatatgtaaggaatttaaggaatggttacatggaactagatttaattgaatctagtggtttaattgattcactaggatatatgctactgaaaggggaatctgcttaaagtgctttctgatatttattattactaaaacttagaatttattaaaaatactgactgtgaaaattacttgggtcgtttgcctttttaaaaggatttttggcatgtctcattaaaaaaagaaatactagatatcttcagtgaagttacaaatcgaatacacattggctctgaaattctgattgatactgggtcataaaaagttttcccaaatcagacttggaaagtgatcactctcttgttactcttttttccttgtcatgggtgatagccatttgtgtttattggaagatcggtgaattttaaggaacataggcccaaatttgaggaagggccatggtttttgatccctccattctgaccggatctctgcattgtgtctactaggggagaatcgctttgtgtcaccattatcttgggacttggtgggacgaaacctcttcgccatggccgtggaaggggtggtgttcttcctcattactgttctgatccagtacagattcttcatcaggcccaggtgagctttttcttagaacccgtggagcacctggttgagggtcacagaggaggcgcacagggaaacactcaccaatgggggttgcattgaactgaactcaaaatatgtgataaaactgattttcctgatgtgggcatcccgcagccccctccctgcccatcctggagactgtggcaagtaggttttataatactacgttagagactgaatctttgtcctgaaaaatagtttgaaaggttcatttttcttgttttttcccccaagacctgtaaatgcaaagctatctcctctgaatgatgaagatgaagatgtgaggcgggaaagacagagaattcttgatggtggaggccagaatgacatcttagaaatcaaggagttgacgaaggtgagagagtacaggttacaatagctcatcttcagtttttttcagctttatgtgctgtaacccagcagtttgctgacttgcttaataaaagggcatgtgttcccaaaatgtacatctataccaaggttctgtcaattttattttaaaaacaccatggagacttcttaaagaattcttactgagaattcttttgtgatatgaattcccattctcgaatacattggttttatatgcttacatttatgtgttagttattaaaacatactaatattgtatatctagtcaaaactgaggtagagagaataaatggttgattttgagtttgagtttcatagtccaaaaagctgatatattgcctgtgttcaagagggtctatatcagccctctagatgccagcatctccaaattttacttttttggaatctgtacagtatttgcaatatttttattacaaatttctactctgtggaatttaatttttaaaatacctgcaatacatatatatgttgaatagatgaaaaattatgtagatgataatgaatgatacggttctaaaaagacaggttaaaaagtaagttcacttttattttgagcttcagaatcattcagaagccagtcgccacaaacgcagaccaaggctcttggcacatcaaatatgcctatggcttagggttattgacaagtcttatgttgcagtgtatgtggtttatagtcctgccttccacagttgcttgggagagctgtgagtcactgaggcttatgaatgtttacattttgtttgttgcagatatatagaaggaagcggaagcctgctgttgacaggatttgcgtgggcattcctcctggtgaggtaaagacactttgtctatattgcgtttgtccctattagttcagactatctctacccaatcaagcaacgatgctcgttaagaggtaaaagtggattttaaaggcttctgtatttatgccaggatggagcaattagtcatcgagaagagagggaccctgtatgtcaagagaatgatttcagagaatccaatacaatttaagaaaaagcatggggctgggcgcagtgattcactcctgtaatcccagcactttgggaggccgaggtgggcggatcacgaggtcaggagattgagaccatcctggccaacatggtgaaaccccatctctactataaatacaaaaattagctgggcatagtagtgcattcctgtagtcccagctactcgggaggctgaggcaggagaattgcttgaacctaggagggggaggttgcccagattgcgctgctgcactccagcctggtgacagagtgagactcatgtcaacaacaaaaacagaaaaagcacgcacatctaaaacatgcttttgtgatccatttgggatggtgatgacattcaaatagttttttaaaaatagattttctcctttctggtttccgtttgtgttcttttatgcccttttgccagagtaggtggtgcaatttggctagctggctttcattactgtttttcacacattaactttggcctcaacttgacaactcaaataatatttataaatacagccacacttaaaatggtcccattatgaaatacatatttaaatatctatacgatgtgttaaaaccaagaaaatatttgattcttctctgatatttaagaattgaaggtttgaggtagttacgtgttaggggcatttatattcatgtttttagagtttgcttatacaacttaatctttccttttcagtgctttgggctcctgggagttaatggggctggaaaatcatcaactttcaagatgttaacaggagataccactgttaccagaggagatgctttccttaacaraaataggtgagaaaagaagtggcttgtattttgctgcaaagactttgtttttaatttatttaaagaaataggttgttatttttgattacagtggtatttttagagttcataaaaatgttgaaatatagtaaagggtaaagaagcacataaaatcatccatgatttcaatatctagagataatcacaatttacatttcctttcagtctcattctcttcttttaacagctttattcaggtataatttacatacaatataatttgcttgttttttaagagtataatttagtgatttttggtaaattgagagttttgcaaccatcaccacaatccagttttagaacttttccatcaccccacatctgtcttatatacacatataaatgtgccatacaattgagatcatactgtatgtagaatttaaaattagtttttattgttaatgagtgtattatgaatatttcccagtgggttacatttcctaagatgtggaattttacattgctacataaaatccccctatgtacatgtacctataatttatttaataaattccttataaatgttggacacattagtttccatttttcactatgtaaatatgtccctgtatacatcttttattatttcctcaggaacaattcctacaaagtaaattgccctctctaaagagcatacaaattgactgagccaccgttaggccattttctgagactgcacaggtcacaaagcaatctgatctttgggaatacagctacattttataggcttcttagataatgttactctaagtactttaaatatgtggggcttctctgggcttttttttttttgagacggagtttcactcttactgcccaggctggagagcaatggcgcgaccttggctcactgcaacctccgcctcccaggttcaagcgattctcctgcctcagcctcctgagtagctgagattacaggtgcccgccacaatgcctgcctaatttttttgtattttcagtagagatggggtttcaccatgttggccagactggtctcgagctcctgacctcaggtgatccacctgcctcagcctcccaaagttctgggattacaggcatgagccactgcgcccggcttctctggacttattatgtggagagatagtacaaggcagtggctttcagagttttttgaccatgaccgttgtgggaaatacattttatatctcaacctagtatgtacacacagacatgtagacacatgtataacctaaagtttcataaagcagtacctactgttactaattgtagtgcactctgctatttcttattctaccttatactgcgtcattaaaaaagtgctggtcatgacccactaaatttatttcccaaaccactaatgaacaatgactcacaatttgaacacactggacagggggatagccaataaaattgaaaagagcaaggaaattaatgtattcatgatctcctctcctgtctcttacatttttgcagtagcaatgtaaaggaatcctaagagaacagacattctgggaatagcaggcctagcgctgcacaactgctttcctaggcttgctcctagtaccaagctcctgacgcatatagcagtggcagtaataaccagcccatagtaaggtttgtcacagggactggttgtaagaactgatttggttggtatagctgtgagggcctggcacggtgtccacgtgtgcctcaatcctaattctgaaaaaggctgaccctgggggtgctaattagatacacagagaggaatgaatgctgccagaaggccaagttcatggcaatgccgctgtggctgaggtgcagtcatcagtctggaacgtgaacactgaacttctctcacatgtgattcttcacttgactggcttcatagaaccccaaagccaccccaccaccacataaattgtgtctctaggttctgtgttgctcacactcaaaatttctgggccttctcatttggtgcatgtgaatggtgcatatgagtgaagtctaggatggggccttagcattaaagccctggggtagtgtgactgagattgttggtaaagaatgtgcagtggttggcatgacctcagaaattctgaaatgggactgcacctgcagactgaagtgttcagagagccagggaggtgcaaggactggggagggtagaggcaggaaccctgcctgccaggaagagctagcatcctgggggcagaaaggctgtgctttcaagtagcagcagatgtattggtatctttgtaatggagaagcatactttacaggaacattaggccagattgtctaaccagagtatctctacctgcttaaaatctaagtagttttcttgtcctttgcagtatcttatcaaacatccatgaagtacatcagaacatgggctactgccctcagtttgatgccatcacagagctgttgactgggagagaacacgtggagttctttgcccttttgagaggagtcccagagaaagaagttggcaaggtactgtgggcacctgaaagccagcctgtctcctttggcatcctgacaatatataccttatggcttttccacacgcattgacttcaggctgtttttcctcatgaatgcagcagcacaaaatgctggttctttgtatctgctttcagggtggaaacctgtaacggtggtggggcagggctgggtgggcagagagggagtgctgctcccaccacacgagtcccttctccctgctttggctcctcaccagttgtcaggttatgattatagaatctagtcctactcagtgaaagaactttcatacatgtatgtgtaggacagcatgataaaattcccaagccagaccaaagtcaaggtgctttttatcactgtaggttggtgagtgggcgattcggaaactgggcctcgtgaagtatggagaaaaatatgctggtaactatagtggaggcaacaaacgcaagctctctacagccatggctttgatcggcgggcctcctgtggtgtttctggtgagtataactgtggatggaaaactgttgttctggcctgagtggaaaacatgactgttcaaaagtcctatatgtccagggctgttgtatgattggcttgtcttcccccagggacagcagagcaaccttggaaaagcagagggaagcttctcccttggcacacactggggtggctgtaccatgcctgcagatgctcccaaatagaggcactccaagcactttgtttcttagcgtgattgaggctggatatgtgatttgatctttctctggaacattctttctaatcatctttgtgttcattccctgaaaatgaagagtgtggacacagctttaaaatccccaaggtagcaactaggtcatagttccttacacacggatagatgaaaaacagatcagactgggaagtggcccttgaccttttttcttctgtagataagagcattgatgttattacgggaagaagcctttgaggcttttatgtattccacctcggtctggaatttgtttctgtaaggctaacagttgcaatatactagggtaatctgagtgagctggaattaaaaaaaaaaaggaatttcaccccaatcttatactgacttcaatagaggtttcagacaaaaagttgttttgtatatacttatcagtcatgaaaagataattacaactaaatggcctttttccttccctatttatttggagaaatttaattacataaaaaagtactcagaatatttgagtttcctgcatcaataagacatttataataatgaccttgtttacaaatgaatttgaaagttactctaattctttgattcatcaagaaataactagaatggcaagttaaaatttaagctgtttcaaagatgcttctgcatttaaaaacaaatttatctttgattttttttccccccagcaaataagacttattttattctaattacaggatgaacccaccacaggcatggatcccaaagcccggcggttcttgtggaattgtgccctaagtgttgtcaaggaggggagatcagtagtgcttacatctcataggtccgtagtaaagtcttgggttcctcactgtgggatgttttaactttccaagtagaatatgcgatcattttgtaaaaattagaaaatacagaaaagcaaagagtaaaacaattattacctgaaattatatatgcatattcttacaaaaatgcaagcccagtataaatactgctctttttcacttaatatattgtaaacattattccaagtcagtgcatttaggtgtcatttcttatagctggatagtattccattaggatatactcttatttaactattcccccttttgtagacatttggattatttccaacttgttcacaattgtaaacaccactacactgaacagcatcatccctatatccacatgtacttgtaacagaatacaattccctaggaagctggaatgctggaagtcatggtgatgttctcatggttacagagaatctctctaaaactaaaacctctttctgttttaccgcagtatggaagaatgtgaagctctttgcactaggatggcaatcatggtcaatggaaggttcaggtgccttggcagtgtccagcatctaaaaaataggtaataaagataatttctttgggatagtgcctagtgagaaggcttgatatttattcttttgtgagtatataaatggtgcctctaaaataaagggaaataaaactgagcaaaacagtatagtggaaagaatgagggctttgaagtccgaactgcattcaaattctgtctttaccatttactggttctgtgactcttgggcaagttacttaactactgtaagagttagtttccctggaagatctacctcctagctttgtgctatagatgaaatgaaaaaaatttacatgtgccagtactggtgagagcgcaagctttggagtcaaacacaaatgggtttgcatcctggccctaccaattatgagctctgagccatgggcaagtgactaactccctgggcctcagtttctctgtaacatctgtcagacttcatgggtccaggtgaggattaaaggagatcatgtatttacagcacatggcatggtgcttcacataaaataagtatttagtaaatgataactggttccttctctcagaaacttatttctgggcctgccaggggccgccctttttcatggcacaagttgggttcccagggttcagtattcttttaaatagttttctggagatcctccatttgggtattttttcctgctttcaggtttggagatggttatacaatagttgtacgaatagcagggtccaacccggacctgaagcctgtccaggatttctttggacttgcatttcctggaagtgttcyaaaagagaaacaccggaacatgctacaataccagcttccatcttcattatcttctctggccaggatattcagcatcctctcccagagcaaaaagcgactccacatagaagactactctgtttctcagacaacacttgaccaagtaagctttgagtgtcaaaacagatttacttctcagggtgtggattcctgccccgacactcccgcccataggtccaagagcagtttgtatcttgaattggtgcttgaattcctgatctactattcctagctatgctttttactaaacctctctgaacctgaaaagggagatgatgcctatgtactctataggattattgtgagaatttactgtaataataaccataaaaactaccatttagtgagcacctaccatgggccaggcattttacttggtgcctaatcctatttaaattagataaaaaagtaccaaataggtcctgacacttaagaagtactcagtaaatattttcttccctcttccctttaatcaagaccgtatgtgccaaagtaaatggatgactgagcagttggtgatgtaggggtggggggcgatatagaaagtcagtttttggccgggcgtggtggctcatgcctgtaatcccagcactttgggaggctgaggagcaggcagatcatgaggtcaggagatccagataatcctggccaacagggtgaaaccccgtctctactaaaaatacaaaaattagctgggcatggtggtgcgcacttgtagtcccagctacttgcgaggctgaggcaggagaattgctcgaacccaggaggtggaggttacagtgagccaaggtctcgccactgcactccagcctggggacagagcaagaccccatttcaaggggggaaaaaaagtctatttttaagttgttattgcttttttcaagtattcttccctccttcacacacagttttctagttaatccatttatgtaattctgtatgctcctacttgacctaatttcaacatctggaaaaatagaactagaataaagaatgagcaagttgagtggtatttataaaggtccatcttaatcttttaacaggtatttgtgaactttgccaaggaccaaagtgatgatgaccacttaaaagacctctcattacacaaaaaccagacagtagtggacgttgcagttctcacatcttttctacaggatgagaaagtgaaagaaagctatgtatgaagaatcctgttcatacggggtggctgaaagtaaagaggractagactttcctttgcaccatgtgaagtgttgtggagaaaagagccagaagttgatgtgggaagaagtaaactggatactgtactgatactattcaatgcaatgcaattcaatgcaatgaaaacaaaattccattacaggggcagtgcctttgtagcctatgtcttgtatggctctcaagtgaaagacttgaatttagttttttacctatacctatgtgaaactctattatggaacccaatggacatatgggtttgaactcacacttttttttttttttttgttcctgtgtattctcattggggttgcaacaataattcatcaagtaatcatggccagcgattattgatcaaaatcaaaaggtaatgcacatcctcattcactaagccatgccatgcccaggagactggtttcccggtgacacatccattgctggcaatgagtgtgccagagttattagtgccaagtttttcagaaagtttgaagcaccatggtgtgtcatgctcacttttgtgaaagctgctctgctcagagtctatcaacattgaatatcagttgacagaatggtgccatgcgtggctaacatcctgctttgattccctctgataagctgttctggtggcagtaacatgcaacaaaaatgtgggtgtctccaggcacgggaaacttggttccattgttatattgtcctatgcttcgagccatgggtctacagggtcatccttatgagactcttaaatatacttagatcctggtaagaggcaaagaatcaacagccaaactgctggggctgcaagctgctgaagccagggcatgggattaaagagattgtgcgttcaaacctagggaagcctgtgcccatttgtcctgactgtctgctaacatggtacactgcatctcaagatgtttatctgacacaagtgtattatttctggctttttgaattaatctagaaaatgaaaagatggagttgtattttgacaaaaatgtttgtactttttaatgttatttggaattttaagttctatcagtgacttctgaatccttagaatggcctctttgtagaaccctgtggtatagaggagtatggccactgccccactatttttattttcttatgtaagtttgcatatcagtcatgactagtgcctagaaagcaatgtgatggtcaggatctcatgacattatatttgagtttctttcagatcatttaggatactcttaatctcacttcatcaatcaaatattttttgagtgtatgctgtagctgaaagagtatgtacgtacgtataagactagagagatattaagtctcagtacacttcctgtgccatgttattcagctcactggtttacaaatataggttgtcttgtggttgtaggagcccactgtaacaatactgggcagcctttttttttttttttttaattgcaacaatgcaaaagccaagaaagtataagggtcacaagtctaaacaatgaattcttcaacagggaaaacagctagcttgaaaacttgctgaaaaacacaacttgtgtttatggcatttagtaccttcaaataattggctttgcagatattggataccccattaaatctgacagtctcaaatttttcatctcttcaatcactagtcaagaaaaatataaaaacaacaaatacttccatatggagcatttttcagagttttctaacccagtcttatttttctagtcagtaaacatttgtaaaaatactgtttcactaatacttactgttaactgtcttgagagaaaagaaaaatatgagagaactattgtttggggaagttcaagtgatctttcaatatcattactaacttcttccactttttccagaatttgaatattaacgctaaaggtgtaagacttcagatttcaaattaatctttctatattttttaaatttacagaatattatataacccactgctgaaaaagaaaaaaatgattgttttagaagttaaagtcaatattgattttaaatataagtaatgaaggcatatttccaataactagtgatatggcatcgttgcattttacagtatcttcaaaaatacagaatttatagaataatttctcctcatttaatatttttcaaaatcaaagttatggtttcctcattttactaaaatcgtattctaattcttcattatagtaaatctatgagcaactccttacttcggttcctctgatttcaaggccatattttaaaaaatcaaaaggcactgtgaactattttgaagaaaacacaacattttaatacagattgaaaggacctcttctgaagctagaaacaatctatagttatacatcttcattaatactgtgttaccttttaaaatagtaattttttacattttcctgtgtaaacctaattgtggtagaaatttttaccaactctatactcaatcaagcaaaatttctgtatattccctgtggaatgtacctatgtgagtttcagaaattctcaaaatacgtgttcaaaaatttctgcttttgcatctttgggacacctcagaaaacttattaacaactgtgaatatgagaaatacagaagaaaataataagccctctatacataaatgcccagcacaattcattgttaaaaaacaaccaaacctcacactactgtatttcattatctgtactgaaagcaaatgctttgtgactattaaatgttgcacatcattcattcactgtatagtaatcattgactaaagccatttgtctgtgttttcttcttgtggttgtatatatcaggtaaaatattttccaaagagccatgtgtcatgtaatactgaaccactttgatattgagacattaatttgtacccttgttattatctactagtaataatgtaatactgtagaaatattgctctaattcttttcaaaattgttgcatcccccttagaatgtttctatttccataaggatttaggtatgctattatcccttcttataccctaagatgaagctgtttttgtgctctttgttcatcattggccctcattccaagcactttacgctgtctgtaatgggatctatttttgcactggaatatctgagaattgcaaaactagacaaaagtttcacaacagatttctaagttaaatcattttcattaaaaggaaaaaagaaaaaaaattttgtatgtcaataactttatatgaagtattaaaatgcatatttctatgttgtaatataatgagtcacaaaataaagctgtgacagttctgttggtctacagaaatttacttttgtgcatttgtggcaccacctactgttgaagggttataaagccattagaaaagtagaggggaagtgatttggatcaaaaggaaaaactttagaaaagattcaaatgttcccttaatcataaaagagaactgaggggactacttgaaaataaaaggttgttttgtattttcatgttggttaagatactgagtaactggtattaagtgttagaggtttttagataaatattctgcttaatgattatgaagctgcactgagatttctgaaaatgctctgtagctgagcttatttaataaatgttcacttggtataggggaagctacaaaggcagccttcagtgtccttttgtttattcaaccaaaaatataaggacacaatgtagcagttatactgggaaggtgctgggggtggtggcaatggtgagcaggaaggcgaagtagatatggaaacagaaatgatactaatatcggtgattccttccttttttcctgtaataagtgctgtgcagacaacatatgagcagtgctgataaatgtaaatgtatttttcatagctcattaagaatcagtttcagaaagagatgtctgcttattttgctacttgaagaatccctgtcaaacagtccttttgaggaagtacaagaggctgtctctatttgtgacctcaggaatggctgtgacagtgtcgtgagcagtccttttcctgtggcacagatctgaactttgtgtgcagaaaaatcttggcttcaagtgagccaagatgccccctgagcatcagcatcacaacttcatcctcctatcttgaagttcatgttatagtgactttaatgaaatcatagaacactgtttcttcgtgaacaatgacgagggagaggaaaaaactttattgaaaaataaaaaggcaggtaatttagatgaaaatatgttacccatgaggttttgtttttgctttttgtttttgtttttgagaaacagaatctcgctctgtcgtcc

SEQ ID NO: 957 - DNA, 2388 bp, Homo sapiens
tcctgccccaggcccagcttctctcctgccttccaacgccatggggagcaatctcagcccccaactctgcctgatgccctttatcttgggcctcttgtctggaggtgtgaccaccactccatggtctttggcccagccccagggatcctgctctctggagggggtagagatcaaaggcggctccttccgacttctccaagagggccaggcactggagtacgtgtgtccttctggcttctacccgtaccctgtgcagacacgtacctgcagatctacggggtcctggagcaccctgaagactcaagaccaaaagactgtcaggaaggcagagtgcagagcaatccactgtccaagaccacacgacttcgagaacggggaatactggccccggtctccctactacaatgtgagtgatgagatctctttccactgctatgacggttacactctccggggctctgccaatcgcacctgccaagtgaatggccggtggagtgggcagacagcgatctgtgacaacggagcggggtactgctccaacccgggcatccccattggcacaaggaaggtgggcagccagtaccgccttgaagacagcgtcacctaccactgcagccgggggcttaccctgcgtggctcccagcggcgaacgtgtcaggaaggtggctcttggagcgggacggagccttcctgccaagactccttcatgtacgacacccctcaagaggtggccgaagctttcctgtcttccctgacagagaccatagaaggagtcgatgctgaggatgggcacggcccaggggaacaacagaagcggaagatcgtcctggacccttcaggctccatgaacatctacctggtgctagatggatcagacagcattggggccagcaacttcacaggagccaaaaagtgtctagtcaacttaattgagaaggtggcaagttatggtgtgaagccaagatatggtctagtgacatatgccacataccccaaaatttgggtcaaagtgtctgaagcagacagcagtaatgcagactgggtcacgaagcagctcaatgaaatcaattatgaagaccacaagttgaagtcagggactaacaccaagaaggccctccaggcagtgtacagcatgatgagctggccagatgacgtccctcctgaaggctggaaccgcacccgccatgtcatcatcctcatgactgatggattgcacaacatgggcggggacccaattactgtcattgatgagatccgggacttgctatacattggcaaggatcgcaaaaacccaagggaggattatctggatgtctatgtgtttggggtcgggcctttggtgaaccaagtgaacatcaatgctttggcttccaagaaagacaatgagcaacatgtgttcaaagtcaaggatatggaaaacctggaagatgttttctaccaaatgatcgatgaaagccagtctctgagtctctgtggcatggtttgggaacacaggaagggtaccgattaccacaagcaaccatggcaggccaagatctcagtcattcgcccttcaaagggacacgagagctgtatgggggctgtggtgtctgagtactttgtgctgacagcagcacattgtttcactgtggatgacaaggaacactcaatcaaggtcagcgtaggaggggagaagcgggacctggagatagaagtagtcctatttcaccccaactacaacattaatgggaaaaaagaagcaggaattcctgaattttatgactatgacgttgccctgatcaagctcaagaataagctgaaatatggccagactatcaggcccatttgtctcccctgcaccgagggaacaactcgagctttgaggcttcctccaactaccacttgccagcaacaaaaggaagagctgctccctgcacaggatatcaaagctctgtttgtgtctgaggaggagaaaaagctgactcggaaggaggtctacatcaagaatggggataagaaaggcagctgtgagagagatgctcaatatgccccaggctatgacaaagtcaaggacatctcagaggtggtcacccctcggttcctttgtactggaggagtgagtccctatgctgaccccaatacttgcagaggtgattctggcggccccttgatagttcacaagagaagtcgtttcattcaagttggtgtaatcagctggggagtagtggatgtctgcaaaaaccagaagcggcaaaagcaggtacctgctcacgcccgagactttcacatcaacctctttcaagtgctgccctggctgaaggagaaactccaagatgaggatttgggttttctataaggggtttcctgctggacaggggcgtgggattgaattaaaacagctgcgacaac

SEQ ID NO: 958 - DNA, 6059 bp, Homo sapiens
cttcagatagattatatctggagtgaaggatcctgccacctacgtatctggcatagtgtgagtcctcataaatgcttactggtttgaagggcaacaaaatagtgaacagagtgaaaatccccactaagatcctgggtccagaaaaagatgggaaacctgtttagctcacccgtgagcccatagttaaaactctttagacaacaggttgtttccgtttacagagaacaataatattgggtggtgagcatctgtgtgggggttggggtgggataggggatacggggagagtggagaaaaaggggacacagggttaatgtgaagtccaggatccccctctacatttaaagttggtttaagttggctttaattaatagcaactcttaagataatcagaattttcttaaccttttagccttactgttgaaaagccctgtgatcttgtacaaatcatttgcttcttggatagtaatttcttttactaaaatgtgggcttttgactagatgaatgtaaatgttcttctagctctgatatcctttattctttatattttctaacagattctgtgtagtgggatgagcagagaacaaaaacaaaataatccagtgagaaaagcccgtaaataaaccttcagaccagagatctattctccagcttattttaagctcaacttaaaaagaagaactgttctctgattcttttcgccttcaatacacttaatgatttaactccaccctccttcaaaagaaacagcatttcctacttttatactgtctatatgattgatttgcacagctcatctggccagaagagctgagacatccgttcccctacaagaaactctccccggtaagtaacctctcagctgcttggcctgttagttagcttctgagatgagtaaaagactttacaggaaacccatagaagacatttggcaaacaccaagtgctcatacaattatcttaaaatataatctttaagataaggaaagggtcacagtttggaatgagtttcagacggttataacatcaaagatacaaaacatgattgtgagtgaaagactttaaagggagcaatagtattttaataactaacaatccttacctctcaaaagaaagatttgcagagagatgagtcttagctgaaatcttgaaatcttatcttctgctaaggagaactaaaccctctccagtgagatgccttctgaatatgtgcccacaagaagttgtgtctaagtctggttctcttttttctttttcctccagacaagagggaagcctaaaaatggtcaaaattaatattaaattacaaacgccaaataaaattttcctctaatatatcagtttcatggcacagttagtatataattctttatggttcaaaattaaaaatgagcttttctaggggcttctctcagctgcctagtctaaggtgcagggagtttgagactcacagggtttaataagagaaaattctcagctagagcagctgaacttaaatagactaggcaagacagctggttataagactaaactacccagaatgcatgacattcatctgtggtggcagacgaaacattttttattatattatttcttgggtatgtatgacaactcttaattgtggcaactcagaaactacaaacacaaacttcacagaaaatgtgaggattttacaattggctgttgtcatctatgaccttctctgggacttgggcacccggccatttcactctgactacatcatgtcaccaaacatctgatggtcttgccttttaattctcttttcgaggactgagagggagggtagcatggtagttaagagtgcaggcttcccgcattcaaaatcggttgcttactagctgtgtggctttgagcaagttactcaccctctctgtgcttcaaggtccttgtctgcaaaatgtgaaaaatatttcctgcctcataaggttgccctaaggattaaatgaatgaatgggtatgatgcttagaacagtgattggcatccagtatgtgccctcgaggcctcttaattattactggcttgctcatagtgcatgttctttgtgggctaactctagcgtcaataaaaatgttaagactgagttgcagccgggcatggtggctcatgcctgtaatcccagcattctaggaggctgaggcaggaggatcgcttgagcccaggagttcgagaccagcctgggcaacatagtgtgatcttgtatctataaaaataaacaaaattagcttggtgtggtggcgcctgtagtccccagccacttggaggggtgaggtgagaggattgcttgagcccgggatggtccaggctgcagtgagccatgatcgtgccactgcactccagcctgggcgacagagtgagaccctgtctcacaacaacaacaacaacaacaaaaaggctgagctgcaccatgcttgacccagtttcttaaaattgttgtcaaagcttcattcactccatggtgctatagagcacaagattttatttggtgagatggtgctttcatgaattcccccaacagagccaagctctccatctagtggacagggaagctagcagcaaaccttcccttcactacaaaacttcattgcttggccaaaaagagagttaattcaatgtagacatctatgtaggcaattaaaaacctattgatgtataaaacagtttgcattcatggagggcaactaaatacattctaggactttataaaagatcactttttatttatgcacagggtggaacaagatggattatcaagtgtcaagtccaatctatgacatcaattattatacatcggagccctgccaaaaaatcaatgtgaagcaaatcgcagcccgcctcctgcctccgctctactcactggtgttcatctttggttttgtgggcaacatgctggtcatcctcatcctgataaactgcaaaaggctgaagagcatgactgacatctacctgctcaacctggccatctctgacctgtttttccttcttactgtccccttctgggctcactatgctgccgcccagtgggactttggaaatacaatgtgtcaactcttgacagggctctattttataggcttcttctctggaatcttcttcatcatcctcctgacaatcgataggtacctggctgtcgtccatgctgtgtttgctttaaaagccaggacggtcacctttggggtggtgacaagtgtgatcacttgggtggtggctgtgtttgcgtctctcccaggaatcatctttaccagatctcaaaaagaaggtcttcattacacctgcagctctcattttccatacagtcagtatcaattctggaagaatttccagacattaaagatagtcatcttggggctggtcctgccgctgcttgtcatggtcatctgctactcgggaatcctaaaaactctgcttcggtgtcgaaatgagaagaagaggcacagggctgtgaggcttatcttcaccatcatgattgtttattttctcttctgggctccctacaacattgtccttctcctgaacaccttccaggaattctttggcctgaataattgcagtagctctaacaggttggaccaagctatgcaggtgacagagactcttgggatgacgcactgctgcatcaaccccatcatctatgcctttgtcggggagaagttcagaaactacctcttagtcttcttccaaaagcacattgccaaacgcttctgcaaatgctgttctattttccagcaagaggctcccgagcgagcaagctcagtttacacccgatccactggggagcaggaaatatctgtgggcttgtgacacggactcaagtgggctggtgacccagtcagagttgtgcacatggcttagttttcatacacagcctgggctgggggtggggtgggagaggtcttttttaaaaggaagttactgttatagagggtctaagattcatccatttatttggcatctgtttaaagtagattagatcttttaagcccatcaattatagaaagccaaatcaaaatatgttgatgaaaaatagcaacctttttatctccccttcacatgcatcaagttattgacaaactctcccttcactccgaaagttccttatgtatatttaaaagaaagcctcagagaattgctgattcttgagtttagtgatctgaacagaaataccaaaattatttcagaaatgtacaactttttacctagtacaaggcaacatataggttgtaaatgtgtttaaaacaggtctttgtcttgctatggggagaaaagacatgaatatgattagtaaagaaatgacacttttcatgtgtgatttcccctccaaggtatggttaataagtttcactgacttagaaccaggcgagagacttgtggcctgggagagctggggaagcttcttaaatgagaaggaatttgagttggatcatctattgctggcaaagacagaagcctcactgcaagcactgcatgggcaagcttggctgtagaaggagacagagctggttgggaagacatggggaggaaggacaaggctagatcatgaagaaccttgacggcattgctccgtctaagtcatgagctgagcagggagatcctggttggtgttgcagaaggtttactctgtggccaaaggagggtcaggaaggatgagcatttagggcaaggagaccaccaacagccctcaggtcagggtgaggatggcctctgctaagctcaaggcgtgaggatgggaaggagggaggtattcgtaaggatgggaaggagggaggtattcgtgcagcatatgaggatgcagagtcagcagaactggggtggatttggtttggaagtgagggtcagagaggagtcagagagaatccctagtcttcaagcagattggagaaacccttgaaaagacatcaagcacagaaggaggaggaggaggtttaggtcaagaagaagatggattggtgtaaaaggatgggtctggtttgcagagcttgaacacagtctcacccagactccaggctgtctttcactgaatgcttctgacttcatagatttccttcccatcccagctgaaatactgaggggtctccaggaggagactagatttatgaatacacgaggtatgaggtctaggaacatacttcagctcacacatgagatctaggtgaggattgattacctagtagtcatttcatgggttgttgggaggattctatgaggcaaccacaggcagcatttagcacatactacacattcaataagcatcaaactcttagttactcattcagggatagcactgagcaaagcattgagcaaaggggtcccatataggtgagggaagcctgaaaaactaagatgctgcctgcccagtgcacacaagtgtaggtatcattttctgcatttaaccgtcaataggcaaaggggggaagggacatattcatttggaaataagctgccttgagccttaaaacccacaaaagtacaatttaccagcctccgtatttcagactgaatgggggtggggggggcgccttaggtacttattccagatgccttctccagacaaaccagaagcaacagaaaaaatcgtctctccctccctttgaaatgaatataccccttagtgtttgggtatattcatttcaaagggagagagagaggtttttttctgttctttctcatatgattgtgcacatacttgagactgttttgaatttgggggatggctaaaaccatcatagtacaggtaaggtgagggaatagtaagtggtgagaactactcagggaatgaaggtgtcagaataataagaggtgctactgactttctcagcctctgaatatgaacggtgagcattgtggctgtcagcaggaagcaacgaagggaaatgtctttccttttgctcttaagttgtggagagtgcaacagtagcataggaccctaccctctgggccaagtcaaagacattctgacatcttagtatttgcatattcttatgtatgtgaaagttacaaattgcttgaaagaaaatatgcatctaataaaaaacaccttcta

SEQ ID NO: 959 - DNA, 806 bp, Homo sapiens
ggtccccttctgcttcttcttgcggtagccagggagggcagcccacgggcaggaagcgggggtgggggtgcagagtcagaggtgcacgtggacagagacagagagacagggacacgtgggcagagacggataaagacagagacccagagaaagccagatatgttgacagacacagagacagacgccagagaggaaggcagacaaagagacgggtggagacaaagactcccaccaagagacgcagaaggaagatgccgacggtaaagacaaaacaggagacgcgcgcaaggagcaggtcagagcccaggctcgctgagagaggaagggctgggctggggcagcccggaggcagagagaccgagagtgcggggcgggcgagggacgccagggccgcgtcaccccagcccgttcctagctccgctcccggcagggggcgccctggcctcgtggcacgaccggcccgcggggcgcggggctcgggccgggggcggggccggggccgggctggggaggggttggggccgggggcgggggagggggcgggctgcccgggcctcactcgggccccgcggccgcctttataaggcggcgggggtggtggcccgggccgcgttgcgctcccgccactccgcgcccgctatcctggctccgtgctcccacgcgcttgtgcctggacggaccctcgccagtgctctgcgcaggtaaggattcgacgctgccccgcgccctggttccccagggccccagcggacgtggtccatccccttctgcatcctccgctggccccgtggttgaactttaatggc

SEQ ID NO: 960 - DNA, 183 bp, Homo sapiens
tttaatttctaggattggaacatcagttaacatctgaccactgccagcccaccccctcccacccacgtcgattgcatctctgggctccagggataaagcaggtcttggggtgcaccatgatttcaccattcttagtactggccattggcacctgccttactaactccttagtgccaggtatgc

SEQ ID NO: 961 - DNA, 138 bp, Homo sapiens
ctctgtgtttagagaaagagaaagaccccaagtactggcgagaccaagcgcaagagacactgaaatatgccctggagcttcagaagctcaacaccaacgtggctaagaatgtcatcatgttcctgggagatggtgagg

SEQ ID NO: 962 - DNA, 128 bp, Homo sapiens
ctgcagggatgggtgtctccacagtgacggctgcccgcatcctcaagggtcagctccaccacaaccctggggaggagaccaggctggagatggacaagttccccttcgtggccctctccaaggtgagc

SEQ ID NO: 963 - DNA, 193 bp, Homo sapiens
ccccacctgcagacgtacaacaccaatgcccaggtccctgacagcgccggcaccgccaccgcctacctgtgtggggtgaaggccaatgagggcaccgtgggggtaagcgcagccactgagcgttcccggtgcaacaccacccaggggaacgaggtcacctccatcctgcgctgggccaaggacgctggtgagt

SEQ ID NO: 964 - DNA, 194 bp, Homo sapiens
cctgcaccccagggaaatctgtgggcattgtgaccaccacgagagtgaaccatgccacccccagcgccgcctacgcccactcggctgaccgggactggtactcagacaacgagatgccccctgaggccttgagccagggctgtaaggacatcgcctaccagctcatgcataacatcagggacattgacgtgagt

SEQ ID NO: 965 - DNA, 162 bp, Homo sapiens
tgtctcttttaggtgatcatggggggtggccggaaatacatgtaccccaagaataaaactgatgtggagtatgagagtgacgagaaagccaggggcacgaggctggacggcctggacctcgttgacacctggaagagcttcaaaccgagatacaaggtagcc

SEQ ID NO: 966 - DNA, 88 bp, Homo sapiens
ccttcctcctagcactcccacttcatctggaaccgcacggaactcctgacccttgacccccacaatgtggactacctattgggtaagt

SEQ ID NO: 967 - DNA, 153 bp, Homo sapiens
cgtcctcctcaggtctcttcgagccaggggacatgcagtacgagctgaacaggaacaacgtgacggacccgtcactctccgagatggtggtggtggccatccagatcctgcggaagaaccccaaaggcttcttcttgctggtggaaggtaggg

SEQ ID NO: 968 - DNA, 210 bp, Homo sapiens
tggtgtcccaaggaggcagaattgaccacgggcaccatgaaggaaaagccaagcaggccctgcatgaggcggtggagatggaccgggccatcgggcaggcaggcagcttgacctcctcggaagacactctgaccgtggtcactgcggaccattcccacgtcttcacatttggtggatacaccccccgtggcaactctatctttggtaggt

SEQ ID NO: 969 - DNA, 138 bp, Homo sapiens
ctccctgtgcaggtctggcccccatgctgagtgacacagacaagaagcccttcactgccatcctgtatggcaatgggcctggctacaaggtggtgggcggtgaacgagagaatgtctccatggtggactatggtgaga

SEQ ID NO: 970 - DNA, 1051 bp, Homo sapiens
cctggcccacagctcacaacaactaccaggcgcagtctgctgtgcccctgcgccacgagacccacggcggggaggacgtggccgtcttctccaagggccccatggcgcacctgctgcacggcgtccacgagcagaactacgtcccccacgtgatggcgtatgcagcctgcatcggggccaacctcggccactgtgctcctgccagctcggcaggcagccttgctgcaggccccctgctgctcgctctggccctctaccccctgagcgtcctgttctgagggcccagggcccgggcacccacaagcccgtgacagatgccaacttcccacacggcagcccccccttcaaggggcagggaggtgggggcctcctcagcctctgcaactgcaagaaaggggacccaggaaaccaaagtctgccgcccacctcgctcccctctggaatcttccccaagggccaaacccacttctggcctccagcctttgctccctccccgctgccctttggccaacagggtagatttctcttgggcaggcagagagtacagactgcagacattctcaaagcctcttatttttctagcgaacgtatttctccagacccagaggccctgaagcctccgtggaacattctggatctgaccctcccagtctcatctcctgaccctcccactcccatctccttacctctggaaccccccaggccctacaatgctcatgtccctgtccccaggccagccctccttcaggggagttgaggtctttctcctcaggacaaggccttgctcactcactcactccaagaccaccagggtcccaggaagccggtgcctgggtggccatcctacccagcgtgcccaggccgggaagagccacctggcagggctcacactcctgggctctgaacacacacgccagctcctctctgaagcgactctcctgtttggaacggcaaaaaaaaatttttttttctctttttggtggtggttaaaagggaacacaaaacatttaaataaaactttccgaggacagagctgagtctttgtggtcag

SEQ ID NO: 971 - DNA, 1657 bp, Homo sapiens
cggcagcggtctcaggccaagccccctgccagcatggccagcgagttcaagaagaagctcttctggagggcagtggtggccgagttcctggccacgaccctctttgtcttcatcagcatcggttctgccctgggcttcaaatacccggtggggaacaaccagacggcggtccaggacaacgtgaaggtgtcgctggccttcgggctgagcatcgccacgctggcgcagagtgtgggccacatcagcggcgcccacctcaacccggctgtcacactggggctgctgctcagctgccagatcagcatcttccgtgccctcatgtacatcatcgcccagtgcgtgggggccatcgtcgccaccgccatcctctcaggcatcacctcctccctgactgggaactcgcttggccgcaatgacctggctgatggtgtgaactcgggccagggcctgggcatcgagatcatcgggaccctccagctggtgctatgcgtgctggctactaccgaccggaggcgccgtgaccttggtggctcagccccccttgccatcggcctctctgtagcccttggacacctcctggctattgactacactggctgtgggattaaccctgctcggtcctttggctccgcggtgatcacacacaacttcagcaaccactggattttctgggtggggccattcatcgggggagccctggctgtactcatctacgacttcatcctggccccacgcagcagtgacctcacagaccgcgtgaaggtgtggaccagcggccaggtggaggagtatgacctggatgccgacgacatcaactccagggtggagatgaagcccaaatagaaggggtctggcccgggcatccacgtagggggcaggggcaggggcgggcggagggaggggaggggtgaaatccatactgtagacactctgacaagctggccaaagtcacttccccaagatctgccagacctgcatggtcaagcctcttatgggggtgtttctatctctttctttctctttctgtttcctggcctcagagcttcctggggaccaagatttaccaattcacccactcccttgaagttgtggaggaggtgaaagaaagggacccacctgctagtcgcccctcagagcatgatgggaggtgtgccagaaagtcccccctcgccccaaagttgctcaccgactcacctgcgcaagtgcctgggattctaccgtaattgctttgtgcctttgggcaggccctccttcttttcctaacatgcaccttgctcccaatggtgcttggagggggaagagatcccaggaggtgcagtggagggggcaagctttgctccttcagttctgcttgctcccaagcccctgacccgctcggacttactgcctgaccttggaatcgtccctatatcagggcctgagtgacctccttctgcaaagtggcagggaccggcagagctctacaggcctgcagcccctaagtgcaaacacagcatgggtccagaagacgtggtctagaccagggctgctctttccacttgccctgtgttctttccccaggggcatgactgtcgccacacgcctctgcatatatgtctctttggagttggaatttcattatatgttaagaaaataaaggaaaatgacttgtaaggtc

SEQ ID NO: 972 - DNA, 816 bp, Homo sapiens
ggccctctctgccctggccgcgctgtgtggtgaccgcaggcccgagacatgagggcggcccgtgctctgctgcccctgctgctgcaggcctgctggacagccgcgcaggatgagccggagaccccgagggccgtggccttccaggactgccccgtggacctgttctttgtgctggacacctctgagagcgtggccctgaggctgaagccctacggggccctcgtggacaaagtcaagtccttcaccaagcgcttcatcgacaacctgagggacaggtactaccgctgtgaccgaaacctggtgtggaacgcaggcgcgctgcactacagtgacgaggtggagatcatccaaggcctcacgcgcatgcctggcggccgcgacgcactcaaaagcagcgtggacgcggtcaagtactttgggaagggcacctacaccgactgcgctatcaagaaggggctggagcagctcctcgtggggggctcccacctgaaggagaataagtacctgattgtggtgaccgacgggcaccccctggagggctacaaggaaccctgtggggggctggaggatgctgtgaacgaggccaagcacctgggcgtcaaagtcttctcggtggccatcacacccgaccacctggagccgcgtctgagcatcatcgccacggaccacacgtaccggcgcaacttcacggcggctgactggggccagagccgcgacgcagaggaggccatcagccagaccatcgacaccatcgtggacatgatcaaaaataacgttgagcaagtgtgctgctccttcgaatgccagcctgcaaga

SEQ ID NO: 973 - DNA, 2255 bp, Homo sapiens
  misc_feature 314, 315, 321, 347, 348, 583, 604, 605, 615, 636, 637, 702,703, 709, 710, 729, 743, 744, 754, 935, 1178, 1179, 1316,1351: n = A,T,C or G
aattgaggggaggtggccagcccgcagaggtggggtgctggggctgcatgatttttgccctgcgtcccttctcttcggggctcctttcccctctcatacataaaatcgctttcaaattaaaatcgctgttttctggactgaggtgactgtatgaggatgggcagcgcgtttcgggcttggggggggtatccggttgggagctccggacgcatccctggacgccgccgccgaggttccgtggggcccaagaggtgcacgcagggtgggggacacaaggcaagctttgctaggaggggggagagggtgtgccaggnngggggnggggccggccggaggaggaagggggnncggtggattctcaaaggcgccttgttcgctcgtgccctctcgcccagcgggcggcggcgcctcggctcgctgcggccttcctccgggcgctgcgggctccgggcagacccggcgccgtgcccgctcgtggggcgcactggcgccgagcgctgcgtgcgtctcagcgttgcgcccggaggcggcccacgtccccgagtgaccccatttccctggacccttccaaccaggtcgactnctcgctcatcttaccactgcnncccctctacntcggctctgggactccctaanngcgtcccccatttgcatctccttggacctgactatcctgtgtttgtcggtgggtcccagtctctnnactctnnctctccgtagaacaccttnaaccacataccccnnaccagttagncgctatctatagctgtctataaataccccgcccgccgctctgtaattacacggcgggtgagtaagtaattatggagacctgattatgggtggggtgggactgcgacccccaggcccgcctctccccctcccactgtgccctaaatcccgcccaggcctctgctgaaaggctctgggccccnaagagggagggaatgggagggagtgtgtgtgactggacgtttgggtcctagaaaaggaaggggctagggaagatattggggttcccgaaaagagaatcttagggtacaggccgttgagacctacaaggggcaggagagagcgagcgatagaggaggttcccgcctccctccccaggtggagactgaggggtgggggtttccttcggcggctgtgggcgggcggctggagtgcatgggggccgnncgggggcgggggcgaggtgggggctctgggggccagggtggccggggacacacagaagcggcagccaccgaggagggagcagtgccgggagccccgacggcgccttgctgcatggagctgggccgctgacagctgtngtgcccgcagcctctgacctccctgggaccccggngtctgaggctcatagtctgctccctgtcttctgtcagcctcagggcatccagcgtctcaggccgacctgtccctgggacccggcgtttcgcttctcagccatggagcggtgcagccgctgccatcgcctcctcctcctcctacctctggtgctggggctgagcgcggccccaggctgggcaggtaagaggagtcctgatgcctgggtcctcggagtcaggctggagctctgagtgtctctgggaaggggccagctgatgcctggggcagcagcttctgagtctaacaaggagatttggggcttcaaggctacaggctggagggctggacacctgtgttccttggcatcagggtaggaatctctttgtccttgaagtgactgggggagggcagatagggctgaaaggtggaggaccactttagagacctgaatggggatggatgcttgtcttgagtccttgggaagagctgaagatggccagggccagcccggtccagtcattgctggtgtggggatggtagacgccaatgttgatgggtgaggcgtgtgtgtcttatggcctttctgtcgatatctctgggataaggggtgagcacctgtgattcagagcagagcccagtaagcccagaaagaaaggaagccttgactacctgtctcattggcctcctggacagggtccccctccccctccctgtgccctcgatcgtgcacgcagctgtctggggagcactggggctggctgccaacaggacggcctccggacaggccaggatcaggtgtctgagcagagccaactctttgcattcctgcctagcccctcctccctctggccagccaggctcccctgggaccctggtgcccacaaccctgatcttttccttctttttcccaggacccagaattc

SEQ ID NO: 974 - DNA, 1667 bp, Homo sapiens
  misc_feature 6, 7, 54: n = A,T,C or G
tggagnnagacagaagagacagagcagaaagaccaacataaagagacagagagngtaagagagtgagagagacaggagacagatgaagagttgagagaagtattcagagagtacagagagagacagattcataagctaaaagacaaagagagagcgtaagagaggcagatgctaggagagacaggggcaggagtgtcatggggttgaatgccagctgatgctgccctgcctccaggtacctttgcatttcccatccattcaggtactgttcagaagcaagtgagggtgaggtgacctttcccttgcagggagtttgagccctggaaagctgagttctagatcccaaatgtcccctatttatgccctcctgagggcatgtcccttctcctgataatcatggactctcccaggtgcaccccctgtggatgtgctccgggccctgaggttcccctccctccctgatggtgtccggagagcgaaaggcatctgtccagctgatgtggcctaccgagtggcacgacctgcccagctcagtgcacccactcgccagcttttcccaggtatgggtgacatggtggggtaggcctggggggaggtaatgggatggggcctaggatcagacaccaggaggaaaggggttgtggcggctccctttgcctctcactctgtgtgtatctctctcggttactaggaggatttccaaaagattttcctctgctgactgttgtccgcacccgccctggtctccgagctcccctcctgactctctacagtgcccagggtgtccgacagctgggcctggagctgggccgacctgtccgcttcctgtatgaagaccagacagggcggcctcaacctccctctcagccagtcttccgaggcctcagcctagcagatggcaagtaagtttgtttgctcctctggtctgcctggcccacactttcaggaggaagtgcccccaaacccctacactctaaactgtgaaacccttgagaccctttgggccacaccacacctacccactgcccaaacttcagtcacttctagtccagagtttgggctttagagtgtacagcccttctctgcatgttgaactagcctgtaccttgggcaagttacttaaaatttttgagcctcagtttctacatctgtaaaatagacattaaatagaattggcacaaataagaaagtgacggcatggtgtctggtgcactgtaaacactcaataaatggtagccattgttaccattggcttcaactcttatcactgctctccaaccatgttgactcccctacttcagtcagccaagagttcacttgaacctcttccaccatttcaggtggcaccgtgtggctgtggctgtgaagggccagtctgtcaccctcattgttgactgcaagaagcgagtcacccggcctctcccccgaagtgctcgtccagtattggacacccatggagtgatcatctttggtgcccgtattctggatgaagaagtctttgaggtaaccagagcaatcagaggcaggattgacttctggtcccctatcttgtgcccactacccttctggccccagcatgtcatcttcctattccctaggccttcatttttttttcttatgaattttcatttctattttctatcttcaagggctactgttctctgcag

SEQ ID NO: 975 - DNA, 966 bp, Homo sapiens
  misc_feature 545, 821, 954: n = A,T,C or G
gaattctggaaggcctgggatctggtcctgattctgccactctgggtgaccttggggcagtcattgcctttttgggcttttctgaatggaacgtatctgaaaaatgggtagaaagaaagatccttgttctgccaactttcctggttgttatgaaggtcctatgagatgccttgaaaactgaaaagggctatgcatatggaggactgacagtgaccttctcccatcttagggttttacctaggattggcctcctatactctttctcccggatgataccctctgcctctctctgaatctctccgctccatctctctcatgtctttgcagggtgatgtccaggagctggccattgtcccaggggtccaggcagcctatgaatcatgtgaacagaaggagctggaatgcgaggggggccagagggaaagaccccaaaaccaacagcctcacagagcccagagatctccacagcagcaaccatcaagacttcacaggccacaaaatcaggaaccccagagccaggtgagggagctgggagaacccccaantgcagctctatcaccccacgagtatgggaatgacacccatgtgacactctctcctccttagttgtcctccccaccctcatctccctattcccatcacccccctcctcctagtcctcattcatcagcctttttattttcatctaaaaataaaaagagttgttatgaagaatttgtggctggagctgtgttccctgctctgcgtctcctcttccatcttcctggaactgtgtccctgggttttcccttccttctttgaattaaggatggtattggganacagtgggagaggggtgagagctggggaggcaggtaggagaggggactgaagccaggagaaagcagtcgggatggtgagaccaaggaggaggaatgggaaggagtagggatggagggaatatcaaaggagggngtgggtctgcag

SEQ ID NO: 976 - DNA, 7784 bp, Homo sapiens
  misc_feature 233, 234, 235, 236, 316, 331, 333, 509, 510, 1248, 1517,1544, 3544, 3545, 3546, 3568, 4864, 5804, 6057, 6959, 6974: n = A,T,C or G
ctgcagaagtgtgggagtggggaaccagtctctggcccccacctacctggaggggcaggaaaaggggaggtagtagggggaagggaagggaagggaagggaagggagcctgggttggatggggtctggagagtaagaatacagataggctctggggtcagtggtctaaagatcagagggtcaatctcttaatcatgtctgcttctgccccacatgtcgaaccccttccctctnnnnccacctctccccacctccctcctgaccctcacctctcctttcatcttcaactctctgtttcccaactccacacctccccnatttcccaactcccnanaccatctttatatctccctctcccgcccttcaccccacaccttccaattaccccatccccttcctgtctatacccaccccccaatccccagcccactgagtctctctactatgactacgagcccccctattatgatgtgatgactacggggacaacccctgattatcaggtaaacnnaagggaccccttcatttcttccctttctcccagcacccccagcaatcatctcctaggacaccttcctcccctcccccatgccgtggggagaggcacagtgtgtttagattatggggatttacttagttcctgccccctccctgtctctctgctgcagcgccctgggagcccccaccacaggcctcccccttcccctaggggcatcggacccctccctgaaagcctaccccacctgccaagaggtcaatgacctggcaggcgtccccctcaccaggccggaggccctctccaactgcaggctttgacccagcatggagcagcctcccctttcccgatgcccagctcggagggcagcttcccccactgcctggccccgccccaggaccagaggcagcagttaccggcagtagagccgggatccagatctctgcccccaaacctctatgaccttggaggttcactctccccaaactatccccctccaaaggggctgcaagatctgagatttcccccatcccccagcacagacagaccctgccctcgggggacaggtgctgctttgcctcccttctgctaacctttctccttccttcccaccccgtgctactcttctccttctctccttggggtcaggaccccaccccaggtgaagaggaagaaatcctggagtcgagcctcttgccaccccttgaggaggtaactctatgccccaccctcacccatctgggggcactgggnacctgtgactcactcccctcagcccatgacgtcttgatggaccagcccctcctctggccggagggttcttaccatgcatttccatcgatggcctctgtctttgggtcactctagaactatgggcctgcttgactctctaagtccagcccgttcccttcagtatccaggcctccttccatgattctttgattcctgagtgacttcgtctccatgttggtgtctaatggtcttactttctatgtggtatttctgttcccgggagccacttnctgtccagtgttgtcaccttttgtctnccctatctctttggtcattcctggactcctttgtctgtcattgtgtccatggactgtccactctgcatccagtcctctggccacccttcattttatccacactctccactgaccacttctgacatctctcccattttgcctttgatggcccttccatttatatacaaccactcccatggctattcttggagaaaaaatccagttctgattaaccttggaatcctttgggctagaagttgtcacaccctggggtccagggtaagcctcctctcagccctaacatccccatctacccctctccctccccatccctgggaaggagcagacagatctccaggtcccccccacagccgacaggttccaggcagaggaatatggggagggtggcacagacccccctgaagggccctacgattacacctatggctatggggatgattatcgtgaggagacagagcttggccctgccctctctgcggagacagcccactcaggagccgtaagtgaaaggagcttctctttcattcttgactaccagtgggagctacaagaattgcttcttgttggtttcgatccttggctgttggctgtgagctatttcccatctgtgacttgtcatgatgtatatgttgcttgaaaagattactacctgccttcctttgccaaatgtcttaccttgtgactcttgtggatacttctgaagctcagggcaattgggaattaaaaaaaaaaaatatgtagccacttcctgtctttcttgatcacttcctgtctaatcgaagctggatttcataaagcttttggtcaataaactactaccttgtgtccattttcagtgtttctctatcatttcttcttggtgaaataattttttgttcatgtttctaccaaacatctaacttcctatgtcacctttttttaacctacaggccacttattatctgtcccttcgctgccttctccagctgtggcatccatcttggtaactgtgtcaggttggactgcaaaggatttattatttctgttctggctctagtttttcatgctatcttgtgacaatttcctttgacaataagccacttcctgtatgtctcaggtcatttaaatcataaagtttccattgtgggcctcgatatttctcatggctacttcctgtgtgtcctagccttggatgtttgtgttttctggaagaattacccttcactgtcatgaattccctttgcaggagtcacattctacctgttttgtgcctttcttttctctctgggtcacggtagccatgttgttgttgaaggttcacttcctggatcctctttccttcactgcttcctgtctgttcagccacttcctgtttgtccagtttgttttctagccatgttggccatgtttaattttcttcggccctggcatcattcttgcttccaagtgtttgtcattttgttctgtgtcccttagttgttctcatatcttccagtattccctgtcagtgggactgcttcctgtctactccgctccgtcttctgcctgccttgcagttctggctgcctcctctaccctgctgccgcatcccatacctcccctctcttgacctcccttgagcttctactgcctttcctttatgctgctctctgggtatttggggttgatatgggatttcagagaattttgaaacggatcattggctgtttggtcagaatgaaggtggagaggggcattctgaagatctttgttggggggagttggggtggtggtgaatgtctcccattctccatgttcttattttgtttctggccctagagttgggaacaggtatctgagtggaggtgtgcaagggagggaactggtgggcttggaatgtacttgagggccagaggaagggcaatgcattcagtggggactgctctccaattttttttttttttgaggcagggtctcactctgtcacccaggttggagtgcagtggcaggatcttggcttactgcaacctctgcctcctggnnntcaagcgatcctctgcctcagnctcccgagtagctggggttacaggcatgtgcactgcgcccggctattttttgtatttttagtagagacggggtttcacatgttggccaggctggtctcaaactactgacctcaaataagctgcctgtttcggccccacaaagtgctgggattacaggcgtgcgccaccgtgcctggcctccaaatttacttagagtatggatgcttaacctttggggcatatttaaacttgtgaaccctttgaaatcctaaataaaattctgtgcataatagcatatactttttcatttcttggagaaagactcacagctttcatcagattcttttttttctttgagatggagttttgctcttgttgcctaggctggagtacgatggcataatcttggttcacttcaacctccacctcctgggttcaagctattctcctgcttcagcctcccaagtagctgggattacaggcatgtgccaccacacccagctaattttgtatttttattagagacggggttgcaccatgttggtcaggctggtctcaaactcctgacctcaggtgatctgcctgcctccgcctcccaaagtgctgggattatgggcgtaacgacctcgcccggcctagcttttatcaggttctcatgtgggtccatgccctcctcttaccccaaataaaaatctacccacaatcttagagagattcttttatgatgtattggggtaaatgtgtggaaggtttcttaaggttctagggagggagtttgggagatgggatagggtcctctagaagagggtttgggaaggtgggtggtttaaaatccctgaaaggggccaggtgtggtgctcacgcctgtaattccagcactttaggaggccaaggcaggcggatcacctgaggtcaggactttgagaccagcctggccaacacggtgaaaccccatctctaataaaaatacaaaaattagccgggcatggtggtgcacatctgtaatcccagtgtaatcccagctacttgggaggctgaggcaggagaatcacttgaacctggaaggcagaggttgtagtgagccgagatcgcgccactatacttcagcctgggtgacagagcaagacttcgtctcaaaaaaaaagaaaaacaaacaaacaaacaaaaacactggaagtttctgggaccttcctgaaagaggctctcagggagatggagaggttgtgtttgctgaggtggggctgggaactgggggggcagggaaccctgaggtctccttggcaggcttgaaaggtttgtgaagagggagttttaggngagggctgtggggctttcgggtagggctgaagtggtctcgagaggatctaagaatcaaggttggagttgagatggagaaaggcctagtgtcctggctgctcacgggccccactggggctacatgtgtgtctccttcaggctgcccatggaccccgagggctgaagggagagaaaggagagcctgcagtgttggaacctgtaagttatgctggtcacagggctgaggcagtggaaataggagaagcaagtggggttgagtgtgctggtcctgtcgcctctgatttttaacctttgactccacagggtatgctcgtggaggggccccctggcccagaagggcctgcggtaagtctagcagtgacctggtggccattcttttcttagaaaccccttctatgtgctcatctgagccttccccacatatgcccaggcctcctgctcagaactcgggagcatccctccaatcaacgcttcccagattcccagatctgttctgcacagaccactcctcagccacaggctggatgtccacacctgtctgaatgcccacacctgacccctactcttttgttcctcagggattgattggtccccctggcatccaggggaacccaggcccagttggagaccctggagagagggtaagggggtgtcctccatgtgacgggggagcttcgggggagctagtggtatccaagcggggggctaccatgcccagtaatttcctgttaggtggcttgttaatgaatgaggggatggttgtgcttcccagcaaccagaaaggagggcagactctggttggggagggtgctgatctggtttctcaccctcaattttccccatggggtgggagactcaggaaagagctagagcaatctacacttattctgttgaagaggatatttcaaaatcatgctaagatcttgatgtcccttatctnaccccatctttgcatctcttcccactccagggcccccctggccgagcagggctccctggatcagatggggctcctggtcctcctggcacatctctcatgctcccagtgagttgtctcttgggttttggaacatgctgatggggaagacaaggaattgtgtcatgttaccaagaaccagatgggcaggaaagatatggaggagtctctaaagatcatcaaagatcatcactccaaagggattcgtctttggggntggggagatggggcctcattaggtgacctagaacaaaacaccagtcttctaggactgggcagaacagcctatatttcaggagctctagaaccaaaagagagtctttctggaggcagaggctggacagtggaggagggcaggagttgagtttctggaatcctctaagtgattatctggaagccatgggaaatgctggatgggcagaacctggggcaaggggcaaaacgctggagaaaccgtctggctgggagggtcccatggctttcttggaagagaacctggaccttctctccttgccctcagttccggtttggcagtggtgggggtgacaagggccctgtggtggcggcccaggaggctcaggcccaggcgatcctgcagcaggcgagggtgagtggggctgcttccctggaaaggaaggctctggggggcactggaagggttggctggagtgagtgtgccgcaggggaggcctgggttggtttggggttaacagggaggttggggagaatcctgggcagtggatgaggatcaggagatggaagggcttgaattttggagagtgctggggctgggggttcccactgcctgtccctcagctctgctgtccccctgctcccctagctggcgctccgtggaccccctggccccatgggatacacagggcgccctggacccttggtgcagtgagcagggtgctcgggtggaggatgctttaattgtgtgtggggtgtggatagttctggaaaggggcttcctggaaaggggcttcttttggggaacactccgaggccactgttggctgtgtccttcttacggccatcctctcttctctctcccagggccaacctgggagccctggcctgaaaggagagtctggagacttaggacctcaggtgacnactttcctccactgnacccccatatctgttcaccagctcagtctccctcactcccctccctatgcctcctaaccccaccccatctctcctctcaccagggccccagaggacctcagggcctcacaggctccctgggcaaggctgggcgaagggtgagtgcccctggggtggatgggtgttgtggggagacagggcctgcagggtaggggactgcggcctgcttgttctgacacttcccttgttctcccagggccgggcaggtcctgatggagcccgagggaccctgggagatcctggagtgaaggtaacaggcttgggcccctccctgaagcctgtagccttcagcccacgctgggctcagttgtttcttggggatgacctagttctccaggcttccccaggatcagcacccccccagctcagggtgcagtagggaggggtgggcttggacagggtcgtgtcctcactctggctatccttcctcctcctagggtgaccgaggttttgatggactcccagggctccctggagagaagggccatagggtgtgatacattagtgggtgtgtgtaattggggatcttctatggagtgaggataggtaggcaaggaggctggaggcttggcaggagctcagtgaaagtaatggatgggctaagtgcagaggttcggtgtctgcctgtgttgggctctgaagcccctcttatgagttcccccattttgcagggtgatactggtgcccagggccttcctgtccccctggtgaggatggagagagggtaagtgtagtggcaaatgtaggggctgggtgcaggggaggtctaga

SEQ ID NO: 977 - DNA, 2199 bp, Homo sapiens
  misc_feature 190, 1319: n = A,T,C or G
caagtctgctcagcatcctgctcatgactctgctcagctgtcctgatcatgtagatgactcctgaggccatggtctctgtctcctctgaggccatagacctctctctccccctctgaggccagccctctctctcctttccagttctcttacgtggactcagagggctccccagtgggtgtggtccagctnaccttcctgcggctgctcagcgtctcagcccaccaggacgtctcctacccctgctctggagcagcccgtgacggtcccctgagactccgtggggccaatgaggatgagctgagcccggagactagcccctatgtcaaagaattcagagatggctgccaggtgggaacaggaagagctgggttgggggctgatctcagactcaggctggaggaaggaggtgggaagaccccttgggcagggcacccagggggagcagggaggagtccgtcctgctggattgtcagggatgcctaggggagctcaaaagccggtgaggaaggtggaaaggatggaagccatcgggtagggttcacttgggtacaaacaccacgtgacacacggttaatgcagacgtgtacacagactaacacatggctgcccagcagaggcacacggtgggggagaagcaaacacacacgcatgggcacatagacacatgccagtctgtacatcctgagtcaccctgatggggccaaggtgctcagaggagaggtgagcctgggcctgaggttagagggtggggggtgcctccatcctgctcacactttcttccttgtctccccctgaagacacagcaaggccggacggtgctggaggtgcgaacgcctgtgctggagcagctgccagtgctggatgcctccttctcagacctgggagccccaccgcggcggggaggggtgctgctggggcctgtctgcttcatgggctaggaccgtctctgtctgatcctgtccattcggaaccaggcccacctggaatcccacaacatcagctctgtgccacctcccaagagggctcctcactatctagggagccctgggccagggcgtggagagccctcagtcggggcaggccaggggaggggtgaagtggttgcctggacaccccacgggaggagtggcatctggggctcttggccctcccacctggagcctgttacccgttagagagctgagacccttatttaaaactcacctcccaatcaccccaaacaaatggaagagaagagaaaggacatggcgtattttgtatttaaaagtaattgtattaattatttaaagtgtggaaagcaaaataacaaaaaagaganacgccaacaaaaaatcagcagatgttgaagacaggggtctcgggggtgggctccggcacccacatctgagtcaggactttcctcagtgactgtgtgtaggggggttcagggctgaacccacctccctcccaccttcctcccacctcacctgtcgcacccactgtgaaagttggaatatgtggtctccctggcctcagggctctgactctgccagggtggggctctctaacccacaggtgttggctgcctggcccatgtgcccactgtctcttccacttggtctgggtttggcaggcactgctgctacttgagggccaggatgctcccccagggaagaaacggaatagtgtggggtgtgtgcagggctgcatccgcagatggctggaatattaaaattcttctatattggctggtaaattgccatggccctgagccactgagtatgttcattgccacccctgtcctcccctgggcacccctcactttccctgatcctgcaattaaagggttaatgtgtggcatatggaagggactcccaggaccctgtgcccagcttccatgctgactgatggttaaataatgtgattgtctcctcccaggtgtctgtgtcactgcttgtgttgttatttcagtctcccccgacacccatctgatgcttcctcttcccagctaagtggttaccagaattgtatggcttaatccagataccctgcaagccctgtccagctggggtgtcagggcccagagtttacaaagcctgggtgactagcataaaattacaaacaatgccccagggacaccaggtaggggtttggggtcctatggctccagtttctgacacgggtgtgcgattgcttctgggtgtgggtgggacgtgcta

SEQ ID NO: 978 - DNA, 1667 bp, Homo sapiens; identical to SEQ ID NO: 974
  misc_feature 6, 7, 54: n = A,T,C or G

SEQ ID NO: 979 - DNA, 2479 bp, Homo sapiens; identical to SEQ ID NO: 91
  misc_feature 1146: n = A,T,C or G

SEQ ID NO: 980 - DNA, 2631 bp, Homo sapiens
acaggtgggtgctggtgctgatgatcccctcgcctcttcccccaggtccatccgccatgtggcccctgtggcgcctcgtgtctctgctggccctgagccaggccctgccctttgagcagagaggcttctgggacttcaccctggacgatgggccattcatgatgaacgatgaggaagcttcgggcgctgacacctcgggcgtcctggacccggactctgtcacacccacctacagcgccatgtgtcctttcggctgccactgccacctgcgggtggttcagtgctccgacctgggtttgtccctgagtgatggggagcggggcatgcagggaggctcaggtgcagcctgagagccccttctgaagggggcacatgctggtcctgtggacggtggcgagcatgatgtaagtgtaggaggggtccagccgtctggctgtgagctgtgcagtttgtgcccacttgtggtggcatccccgtgtgcccgtcagtgtccctgtgtgtgtgtccccggtcctccctaccagtggggctagtcggctggatggctccaagttcatgctggtgatggtggtggggcccctaggtctcgagttcatgctggtggtgggggtggggcccctaggtctcaagttcatgctggtgatgggggtggggcccctaggtctgaagtctgtgcccaaagagatctcccctgacaccacgctgctggacctgcagaacaacgacatctccgagctccgcaaggatgacttcaagggtctccagcacctctacgtaaggagctgggaggaaccagcaggcctacagcagagggcaggggtccgggtgggtgcatgtgcgtggacgtgtggggtatgagaggggttcggggactcgtgggacttcagggtgaagcctggagccagccgtgatgggagctcccgggtttgcggctcactcatgtgggtttgagcaaccacagctgcaggaccggatcgctcagttcggctcccttcgtggctgaaaacgtttcatcacgtccactcctcccagcaacagaggagaacggatttcattgtagccagtgtgcgtgtgaggaaactgaggctgggagcggcaaggcagtggtggcactgctggggctcaggaccgggcctgggtgctgcctcctgccctgcactctgctcacaagcatggactgacctcctcgagcgccagtgggctggggaggcacaggaaggcaggagagaggggcgggtggggtggggagtctgtgccttcacctcctccgcccaccctgcttcaggccctcgtcctggtgaacaacaagatctccaagatccatgagaaggccttcagcccactgcggaacgtgcagaagctctacatctccaagaaccacctggtggagatcccgcccaacctacccagctccctggtggagctccgcatccacgacaaccgcatccgcaaggtgcccaagggagtgttcagtgggctccggaacatgaactgcatcggtgagctgagggcctcccagaacattccagagccttgtctcgaggcatggggaagggagaccaaggaatacctttagaggctcagttcaagaaagagtatggtgagaacggtcaaaagaaaatccatggatttcttggcaaatcctccatgcaggcgatcaccacggctaaagagaagactggccagaggggccgggtggcttccggagccccatcttcatctctggcactcctccctttcctcttgctgcccctggagctagcagtcctggggctagcagtcctgaacagctaggagtttgcaattagcccggtaaattagcagaactgctttcaggagacgggagcagccggcaggtagcagggcccaccacactggcccggaagtgacaggacccagggctgtgcagggaccaccaggctcccgggctaatgaggtctctcccctagagatgggcgggaacccactggagaacagtggctttgaacctggagccttcgatggcctgaagctcaactacctgcgcatctcagaggccaagctgactggcatccccaaaggtaggaagcccactcttcctgcacgcctgcctgcctcacccccaacagcacagatggccagggtgggggctctggatgggcccgatctactcagggaaaggctcaacagtcccctcccgccacctggggcagagctagggcccctgccctcagcacctgcattctcccctgtgccctcttctcctggcagacctccctgagaccctgaatgaactccacctagaccacaacaaaatccaggccatcgaactggaggacctgcttcgctactccaagctgtacaggtgaggccagcagggcaccgccaagggtgatgccagagtccctcagtgctgtgtggcccctcgcgcccagccccccatccttacctccagcctttgagtccgtgtcattctcccgctcacaggctgggcctaggccacaaccagatcaggatgatcgagaacgggagcctgagcttcctgcccaccctccgggagctccacttggacaacaacaagttggccagggtgccctcagggctcccagacctcaagctcctccaggtgagagctgggcatgcacagccagg

SEQ ID NO: 981 - DNA, 941 bp, Homo sapiens
acctcacaccaccaaacacacctctaccccagccccgcccccacatgtcctcaacctgacccacctgagaccctcatccttgtccctggtcacatccagtgccttaatcctggctgacacccacacaaataacacgcccatgccttggtttgctcctcccaacaacggggagcctctggtgtggcccttgaagtaggttgcagaggcaacagcaaaatgcctcctggaggcagcgggcttggcgtggagggagggaggcctgtgacccggcctctctgccttcaggtggtctatctgcactccaacaacatcaccaaagtgggtgtcaacgacttctgtcccatgggcttcggggtgaagcgggcctactacaacggcatcagcctcttcaacaaccccgtgccctactgggaggtgcagccggccactttccgctgcgtcactgaccgcctggccatccagtttggcaactacaaaaagtagaggcagctgcagccaccgcggggcctcagtgggggtctctggggaacacagccagacatcctgatggggaggcagagccaggaagctaagccagggcccagctgcgtccaacccagccccccacctcaggtccctgaccccagctcgatgccccatcaccgcctctccctggctcccaagggtgcaggtgggcgcaaggcccggcccccatcacatgttcccttggcctcagagctgcccctgctctcccaccacagccacccagaggcaccccatgaagcttttttctcgttcactcccaaacccaagtgtccaaagctccagtcctaggagaacagtccctgggtcagcagccaggaggcggtccataagaatggggacagtgggctctgccagggctgccgcacctgtccagaacaacatgttctgttcctcctcctcatgcatttccagccttg

SEQ ID NO: 982 - DNA, 260 bp, Homo sapiens
ggacagcggtctccccagcctgccctgctcagccctgcccccaaacctgtactgtcccggaggaggttgggaggtggaggcccagcatcccgcgcagatgacaccatcaaccgccagagtcccagacaccggttttcctagaagcccctcacccccactggcccactggtggctaggtctccccttactcttctggtccagcgcaaccaggggctgcttctgaggtcggtggctgtctttccattaaagaaacaccgtgc

SEQ ID NO: 983 - DNA, 2361 bp, Homo sapiens
ggcacgaggcccaggagtgagtagctgctttcggtccgccggacacaccggacagatagacgtgcggacggcccaccaccccagccctccaactagtcagcctgcgcctggcgcctcccctctccaggtccatccgccatgtggcccctgtggcgcctcgtgtctctgctggccctgagccaggccctgccctttgagcagagaggcttctgggacttcaccctggacgatgggccattcatgatgaacgatgaggaagcttcgggcgctgacacctcaggcgtcctggacccggactctgtcacacccacctacagcgccatgtgtcctttcggctgccactgccacctgcgggtggttcagtgctccgacctgggtctgaagtctgtgcccaaagagatctcccctgacaccacgctgctggacctgcagaacaacgacatctccgagctccgcaaggatgacttcaagggtctccagcacctctacgccctcgtcctggtgaacaacaagatctccaagatccatgagaaggccttcagcccactgcggaagctgcagaagctctacatctccaagaaccacctggtggagatcccgcccaacctacccagctccctggtggagctccgcatccacgacaaccgcatccgcaaggtgcccaagggagtgttcagcgggctccggaacatgaactgcatcgagatgggcgggaacccactggagaacagtggctttgaacctggagccttcgatggcctgaagctcaactacctgcgcatctcagaggccaagctgactggcatccccaaagacctccctgagaccctgaatgaactccacctagaccacaacaaaatccaggccatcgaactggaggacctgcttcgctactccaagctgtacaggctgggcctaggccacaaccagatcaggatgatcgagaacgggagcctgagcttcctgcccaccctccgggagctccacttggacaacaacaagttggccagggtgccctcagggctcccagacctcaagctcctccaggtggtctatctgcactccaacaacatcaccaaagtgggtgtcaacgacttctgtcccatgggcttcggggtgaagcgggcctactacaacggcatcagcctcttcaacaaccccgtgccctactgggaggtgcagccggccactttccgctgcgtcactgaccgcctggccatccagtttggcaactacaaaaagtagaggcagctgcagccaccgcggggcctcagtgggggtctctggggaacacagccagacatcctgatggggaggcagagccaggaagctaagccagggcccagctgcgtccaacccagccccccacctcgggtccctgaccccagctcgatgccccatcaccgcctctccctggctcccaagggtgcaggtgggcgcaaggcccggcccccatcacatgttcccttggcctcagagctgcccctgctctcccaccacagccacccagaggcaccccatgaagcttttttctcgttcactcccaaacccaagtgtccaaggctccagtcctaggagaacagtccctgggtcagcagccaggaggcggtccataagaatggggacagtgggctctgccagggctgccgcacctgtccagacacacatgttctgttcctcctcctcatgcatttccagcctttcaaccctccccgactctgcggctcccctcagcccccttgcaagttcatggcctgtccctcccagacccctgctccactggcccttcgaccagtcctcccttctgttctctctttccccgtccttcctctctctctctctctctctctctctctctttctgtgtgtgtgtgtgtgtgtgtgtgtgtgtgtgtgtgtgtcttgtgcttcctcagacctttctcgcttctgagcttggtggcctgttccctccatctctccgaacctggcttcgcctgtccctttcactccacaccctctggccttctgccttgagctgggactgctttctgtctgtccggcctgcacccagcccctgcccacaaaaccccagggacagcggtctccccagcctgccctgctcaggccttgcccccaaacctgtactgtcccggaggaggttgggaggtggaggcccagcatcccgcgcagatgacaccatcaaccgccagagtcccagacaccggttttcctagaagcccctcacccccactggcccactggtggctaggtctccccttatccttctggtccagcgcaaggaggggctgcttctgaggtcggtggctgtctttccattaaagaaacaccgtgcaacgtgaaaaaaaaaaaaaaaaaaaaa

SEQ ID NO: 984 - DNA, 2275 bp, Homo sapiens
ggcgggcgggatcacgaggtcaggacatcagatccatcctgactaactcggtgaaacccgtctctactaaaaatacaaaaaattaaccaggcgtagtggcgggcctgtagtcccagctactcgggaggctgaggcaggagaatggcgtgaacccgggagcggacttgccgtgagccagattgcgcctgcagtctagcctggagagagggcgaccccgtacgaaaaaaaaaaaaaaaagatgcaagaaacaagaaagcaagtttgccactgtccatgcttacaggattcatgtacacctgggatatacatatgacatgagttgatgaaaatttagtaacacaaattagaaagagaaagatgaaaattagtttaaagaggtaatttacttaaggaaagttttgcattaggcataaggaagtgacttccattaattggtgtgaaatggggagaattttatgtgcacaggcatagagacggacatgtttaggtgaaggtgaagaaaaggagttcaagtgaccttgattagaattgaaatgtccaccgtagattatagagatagatgaactaactatgaactgatgattagggtgtaaagaaatatctccattgccagatatagccttatactagtggacaagcatatttttcctgcagagatttatcaaagacctataaatgtatttgcccctctttcaaatatgacacaaaaattactgcttagatagatccagaaatacattggaaagttttctggtatgaggatctggaaagtatacacataaaagtctaaattagaaatatttatactaatctttagagtaatgcagaaaaaatgaccactttctctggtactcttttgctattctatgtgataaactctttctcttccagtttcctaaaaagttatgtcatgaaaaggctgattctctagaaacttgcttgcttcccaggcagcataaaatggaatctcacagaagactctggcttgctgaagaaattgtgagaaatggaaacagctatagataagtatctaacttttaggaagccattcaaacattgctgaaatacttgtcttttgatatttgcctgaaacttaacttcctaggacccaggtggtgatgaagtcgaaggggcataccggtgaggcatttctttccgtgagtctcttacagtctcctatttaaattgagttaggattacttctggcaaaatcccaacataaaaatcttctaggaagatcagttctgtaaattagacatactagataaatgggcatcaagcagtttttcaaaattatgcagttgttaacttcataaggggaaataaaaatgtatgcatttacattgtatgattaaaacaaggcagagcatttctatacgttcctaagttatacaaacatatatgtaagagtgaaatatgtaaaaaaacttttacataagcagatgcatacaaactccagatgtgctctttttcttactgtgggttgtgtcttctataagggaaaaagaaatatttatcatttcttttactgctgaggggatgggtgcggctctcatatttcagaaaggggctggaaagtgagggaagccaaactttttcctatttaaggccaaagcaaaggaatctcagtggctgagttttatgacgggcccggtgcctgaagggcagggaacaacttgatggtgctactttgaactgcttttcttttctccttttgcaccaagagtctcatgtctgatatttagacatgatgagctttgtgcaaaaggggagctggctacttctcgctctgcttcatcccactattattctggcacaacaggaagctgttgaaggaggatgttcccatcttggtcagtcctatgcggatagagatgtctggaagccagaaccatgccaaatatgtgtctgtgactcaggatccgttctctgcgatgacataatatgtgacgatcaagaattagactgccccaacccagaaattccatttggagaatgttgtgcagtttgcccacagcctccaactgctcctactcgccctcctaatggtcaaggacctcaaggccccaagggagatccaggacctcctggtattcctgggagaaatggtgaccctggtattccaggacaaccagggtcccctggttctcctggcccccctggaatctgtgaatcatgccctactggtcctcagaactattctccccagtatgattcatatgatgtcaagtctggagtagcagtaggaggactcgcaggctatcctggaccagct

SEQ ID NO: 985 - DNA, 5460 bp, Homo sapiens
cgggcccggtgctgaagggcagggaacaacttgatggtgctactttgaactgcttttcttttctcctttttgcacaaagagtctcatgtctgatatttagacatgatgagctttgtgcaaaaggggagctggctacttctcgctctgcttcatcccactattattttggcacaacaggaagctgttgaaggaggatgttcccatcttggtcagtcctatgcggatagagatgtctggaagccagaaccatgccaaatatgtgtctgtgactcaggatccgttctctgcgatgacataatatgtgacgatcaagaattagactgccccaacccagaaattccatttggagaatgttgtgcagtttgcccacagcctccaactgctcctactcgccctcctaatggtcaaggacctcaaggccccaagggagatccaggccctcctggtattcctgggagaaatggtgaccctggtattccaggacaaccagggtcccctggttctcctggcccccctggaatctgtgaatcatgccctactggtcctcagaactattctccccagtatgattcatatgatgtcaagtctggagtagcagtaggaggactcgcaggctatcctggaccagctggccccccaggccctcccggtccccctggtacatctggtcatcctggttcccctggatctccaggataccaaggaccccctggtgaacctgggcaagctggtccttcaggccctccaggacctcctggtgctataggtccatctggtcctgctggaaaagatggagaatcaggtagacccggacgacctggagagcgaggattgcctggacctccaggtatcaaaggtccagctgggatacctggattccctggtatgaaaggacacagaggcttcgatggacgaaatggagaaaagggtgaaacaggtgctcctggattaaagggtgaaaatggtcttccaggcgaaaatggagctcctggacccatgggtccaagaggggctcctggtgagcgaggacggccaggacttcctggggctgcaggtgctcggggtaatgacggtgctcgaggcagtgatggtcaaccaggccctcctggtcctcctggaactgccggattccctggatcccctggtgctaagggtgaagttggacctgcagggtctcctggttcaaatggtgcccctggacaaagaggagaacctggacctcagggacacgctggtgctcaaggtcctcctggccctcctgggattaatggtagtcctggtggtaaaggcgaaatgggtcccgctggcattcctggagctcctggactgatgggagcccggggtcctccaggaccagccggtgctaatggtgctcctggactgcgaggtggtgcaggtgagcctggtaagaatggtgccaaaggagagcccggaccacgtggtgaacgcggtgaggctggtattccaggtgttccaggagctaaaggcgaagatggcaaggatggatcacctggagaacctggtgcaaatgggcttccaggagctgcaggagaaaggggtgcccctgggttccgaggacctgctggaccaaatggcatcccaggagaaaagggtcctgctggagagcgtggtgctccaggccctgcagggcccagaggagctgctggagaacctggcagagatggcgtccctggaggtccaggaatgaggggcatgcccggaagtccaggaggaccaggaagtgatgggaaaccagggcctcccggaagtcaaggagaaagtggtcgaccaggtcctcctgggccatctggtccccgaggtcagcctggtgtcatgggcttccccggtcctaaaggaaatgatggtgctcctggtaagaatggagaacgaggtggccctggaggacctggccctcagggtcctcctggaaagaatggtgaaactggacctcaaggacccccagggcctactgggcctggtggtgacaaaggagacacaggaccccctggtccacaaggattacaaggcttgcctggtacaggtggtcctccaggagaaaatggaaaacctggggaaccaggtccaaagggtgatgccggtgcacctggagctccaggaggcaagggtgatgctggtgcccctggtgaacgtggacctcctggattggcaggggccccaggacttagaggtggagctggtccccctggtcccgaaggaggaaagggtgctgctggtcctcctgggccacctggtgctgctggtactcctggtctgcaaggaatgcctggagaaagaggaggtcttggaagtcctggtccaaagggtgacaagggtgaaccaggcggcccaggtgctgatggtgtcccagggaaagatggcccaaggggtcctactggtcctattggtcctcctggcccagctggccagcctggagataagggtgaaggtggtgcccccggacttccaggtatagctggacctcgtggtagccctggtgagagaggtgaaactggccctccaggacctgctggtttccctggtgctcctggacagaatggtgaacctggtggtaaaggagaaagaggggctccgggtgagaaaggtgaaggaggccctcctggagttgcaggaccccctggaggttctggacctgctggtcctcctggtccccaaggtgtcaaaggtgaacgtggcagtcctggtggacctggtgctgctggcttccctggtgctcgtggtcttcctggtcctcctggtagtaatggtaacccaggacccccaggtcccagcggttctccaggcaaggatgggcccccaggtcctgcgggtaacactggtgctcctggcagccctggagtgtctggaccaaaaggtgatgctggccaaccaggagagaagggatcgcctggtgcccagggcccaccaggagctccaggcccacttgggattgctgggatcactggagcacggggtcttgcaggaccaccaggcatgccaggtcctaggggaagccctggccctcagggtgtcaagggtgaaagtgggaaaccaggagctaacggtctcagtggagaacgtggtccccctggaccccagggtcttcctggtctggctggtacagctggtgaacctggaagagatggaaaccctggatcagatggtcttccaggccgagatggatctcctggtggcaagggtgatcgtggtgaaaatggctctcctggtgcccctggcgctcctggtcatccaggcccacctggtcctgtcggtccagctggaaagagtggtgacagaggagaaagtggccctgctggccctgctggtgctcccggtcctgctggttcccgaggtgctcctggtcctcaaggcccacgtggtgacaaaggtgaaacaggtgaacgtggagctgctggcatcaaaggacatcgaggattccctggtaatccaggtgccccaggttctccaggccctgctggtcagcagggtgcaatcggcagtccaggacctgcaggccccagaggacctgttggacccagtggacctcctggcaaagatggaaccagtggacatccaggtcccattggaccaccagggcctcgaggtaacagaggtgaaagaggatctgagggctccccaggccacccagggcaaccaggccctcctggacctcctggtgcccctggtccttgctgtggtggtgttggagccgctgccattgctgggattggaggtgaaaaagctggcggttttgccccgtattatggagatgaaccaatggatttcaaaatcaacaccgatgagattatgacttcactcaagtctgttaatggacaaatagaaagcctcattagtcctgatggttctcgtaaaaaccccgctagaaactgcagagacctgaaattctgccatcctgaactcaagagtggagaatactgggttgaccctaaccaaggatgcaaattggatgctatcaaggtattctgtaatatggaaactggggaaacatgcataagtgccaatcctttgaatgttccacggaaacactggtggacagattctagtgctgagaagaaacacgtttggtttggagagtccatggatggtggttttcagtttagctacggcaatcctgaacttcctgaagatgtccttgatgtgcagctggcattccttcgacttctctccagccgagcttcccagaacatcacatatcactgcaaaaatagcattgcatacatggatcaggccagtggaaatgtaaagaaggccctgaagctgatggggtcaaatgaaggtgaattcaaggctgaaggaaatagcaaattcacctacacagttctggaggatggttgcacgaaacacactggggaatggagcaaaacagtctttgaatatcgaacacgcaaggctgtgagactacctattgtagatattgcaccctatgacattggtggtcctgatcaagaatttggtgtggacgttggccctgtttgctttttataaaccaaactctatctgaaatcccaacaaaaaaaatttaactccatatgtgttcctcttgttctaatcttgtcaaccagtgcaagtgaccgacaaaattccagttatttatttccaaaatgtttggaaacagtataatttgacaaagaaaaatgatacttctctttttttgctgttccaccaaatacaattcaaatgctttttgttttatttttttaccaattccaatttcaaaatgtctcaatggtgctataataaataaacttcaacactctttatgataacaacactgtgttatattctttgaatcctagcccatctgcagagcaatgactgtgctcaccagtaaaagataacctttctttctgaaatagtcaaatacgaaattagaaaagccctccctattttaactacctcaactggtcagaaacacagattgtattctatgagtcccagaagatgaaaaaaattttatacgttgataaaacttataaatttcattgattaatctcctggaagattggtttaaaaagaaaagtgtaatgcaagaatttaaagaaatatttttaaagccacaattattttaatattggatatcaactgcttgtaaaggtgctcctcttttttcttgtcattgctggtcaagattactaatatttgggaaggctttaaagacgcatgttatggtgctaatgtactttcacttttaaactctagatcagaattgttgacttgcattcagaacataaatgcacaaaatctgtacatgtctcccatcagaaagattcattggcatgccacagggattctcctccttcatcctgtaaaggtcaacaataaaaaccaaattatggggctgcttttgtcacactagcatagagaatgtgttgaaatttaactttgtaagcttgtatgtggttgttgatcttttttttccttacagacacccataataaaata

SEQ ID NO: 986 - DNA, 4169 bp, Homo sapiens
cgcgggtctgtggagagccgggtgcgagcggcggcagcacgaggggaaaagagctgagcggagaccaaagtcagccgggagacagtgggtctgtgagagaccgaatagaggggctggggcacgagcgccattgacaagcaatggggaagaaacagaaaaacaagagcgaagacagcaccaaggatgacattgatcttgatgccttggctgcagaaatagaaggagctggtgctgccaaagaacaggagcctcaaaagtcaaaagggaaaaagaaaaaagagaaaaaaaagcaggactttgatgaagatgatatcctgaaagaactggaagaattgtctttggaagctcaaggcatcaaagctgacagagaaactgttgcagtgaagccaacagaaaacaatgaagaggaattcatctcaaaagataaaaaaaagaaaggacagaagggcaaaaaacagagttttgatgataatgatagcgaagaattggaagataaagattcaaaatcaaaaaagactgcaaaaccgaaagtggaaatgtactctgggagtgatgatgatgatgattttaacaaacttcctaaaaaagctaaagggaaagctcaaaaatcaaataagaagtgggatgggtcagaggaggatgaggataacagtaaaaaaattaaagagcgttcaagaataaattcttctggtgaaagtggtgatgaatcagatgaatttttgcaatctagaaaaggacagaaaaaaaatcagaaaaacaagccaggtcctaacatagaaagtgggaatgaagatgatgacgcctccttcaaaattaagacagtggcccaaaagaaggcagaaaagaaggagcgcgagagaaaaaagcgagatgaagaaaaagcgaaactgcggaagctgaaagaaaaagaagagttagaaacaggtaaaaaggatcagagtaaacaaaaggaatctcaaaggaaatttgaagaagaaactgtaaaatccaaagtgactgttgatactggagtaattcctgcctctgaagagaaagcagagactcccacagctgcagaagatgacaatgaaggagacaaaaagaagaaagataagaagaaaaagaaaggagaaaaggaagaaaaagagaaagagaagaaaaaaggacctagcaaagccactgttaaagctatgcaagaagctctggctaagcttaaagaggaagaagaaagacagaagagagaagaggaagaacgtataaaacggcttgaagaattagaagccaagcgtaaagaagaggaacgattggaacaagaaaaaagagaaaggaaaaagcaaaaagaaaaagaaagaaaagaacgcttgaaaaaagaagggaaacttttaactaaatcccagagagaagccagagccagagccgaagctactcttaaactgctacaagctcagggtgttgaagtgccatcaaaagactctttgccaaagaagaggccaatttatgaagataaaaagaggaaaaaaataccacagcagctagaaagtaaagaagtgtctgaatcaatggaattatgtgctgctgtagaagttatggaacaaggagtaccagaaaaggaagagacaccacctcctgttgaaccagaagaagaagaagatactgaggatgctggattggatgattgggaagctatggccagtgatgaggagacagaaaaagtagaaggaaacacagttcatatagaagtaaaagaaaaccctgaagaggaggaggaggaggaagaagaggaagaagaagatgaagaaagtgaagaagaggaggaagaggagggagaaagtgaaggcagtgaaggtgatgaggaagatgaaaaggtgtcagatgagaaggattcagggaagacattagataaaaagccaagtaaagaaatgagctcagattctgaatatgactctgatgatgatcggactaaagaagaaagggcttatgacaaagcaaaacggaggattgagaaacggcgacttgaacatagtaaaaatgtaaacaccgaaaagctaagagcccctattatctgcgtacttgggcatgtggacacagggaagacaaaaattctagataagctccgtcacacacatgtacaagacggtgaagcaggtggtatcacacaacaaattggggccaccaatgttcctcttgaagctattaatgaacagactaagatgattaaaaattttgatagagagaatgtacggattccaggaatgctaattattgatactcctgggcatgaatctttcagtaatctgagaaatagaggaagctctctttgtgacattgccattttagttgttgatattatgcatggtttggagccccagacaattgagtctatcaaccttctcaaatctaaaaaatgtcccttcattgttgcactcaataagattgataggttatatgattggaaaaagagtcctgactctgatgtggctgctactttaaagaagcagaaaaagaatacaaaagatgaatttgaggagcgagcaaaggctattattgtagaatttgcacagcagggtttgaatgctgctttgttttatgagaataaagatccccgcacttttgtgtctttggtacctacctctgcacatactggtgatggcatgggaagtctgatctaccttcttgtagagttaactcagaccatgttgagcaagagacttgcacactgtgaagagctgagagcacaggtgatggaggttaaagctctcccggggatgggcaccactatagatgtcatcttgatcaatgggcgtttgaaggaaggagatacaatcattgttcctggagtaaaagggcccattgtaactcagattcgaggcctcctgttacctcctcctatgaaggaattacgagtgaagaaccagtatgaaaagcataaagaagtagaagcagctcagggggtaaagattcttggaaaagacctggagaaaacattggctggtttacccctccttgtggcttataaagaagatgaaatccctgttcttaaagatgaattgatccatgagttaaagcagacactaaatgctatcaaattagaagaaaaaggagtctatgtccaggcatctacactgggttctttggaagctctactggaatttctgaaaacatcagaagtgccctatgcaggaattaacattggcccagtgcataaaaaagatgttatgaaggcttcagtgatgttggaacatgaccctcagtatgcagtaattttggccttcgatgtgagaattgaacgagatgcacaagaaatggctgatagtttaggagttagaatttttagtgcagaaattatttatcatttatttgatgcctttacaaaatatagacaagactacaagaaacagaaacaagaagaatttaagcacatagcagtatttccctgcaagataaaaatcctccctcagtacatttttaattctcgagatccgatagtgatgggggtgacggtggaagcaggtcaggtgaaacaggggacacccatgtgtgtcccaagcaaaaattttgttgacatcggaatagtaacaagtattgaaataaaccataaacaagtggatgttgcaaaaaaaggacaagaagtttgtgtaaaaatagaacctatccctggtgagtcacccaaaatgtttggaagacattttgaagctacagatattcttgttagtaagatcagccggcagtccattgatgcactcaaagactggttcagagatgaaatgcagaagagtgactggcagcttattgtggagctgaagaaagtatttgaaatcatctaattttttcacatggagcaggaactggagtaaatgcaatactgtgttgtaatatcccaacaaaaatcagacaaaaaatggaacagacgtatttggacactgatggacttaagtatggaaggaagaaaaataggtgtataaaatgttttccatgagaaaccaagaaacttacactggtttgacagtggtcagttacatgtccccacagttccaatgtgcctgttcactcacctctcccttccccaacccttctctacttggctgctgttttaaagtttgcccttccccaaatttggatttttattacagagtctaaagctctttcgattttatactgattaaatcagtactgcagtatttgattaacca

SEQ ID NO: 987 - DNA, 3732 bp, Homo sapiens
tccggaccctgtcacggatgaactgggtaagtcccctaccctctgtggcccctgatttcctcatctgtggatgggagagatgccagtattccctaccggtgcatgagaactgatgcacgtgtgggtgaagagtgtgaggcaaaagccttaagatgtggctgatattcttagcttggcaacacagttcgaatcctgattggtactgccgggccattctgccatagtccctggctgacacatcaggccgccaagtttggggacttctctctgagtttcctggtgggatagaaactcatctctccacccaactcaaggctcagatgagggtggaaactcacatttgacagctttccaagccaccgcaccacttgctctccaagagaggataaagtgcatctgtcatggctgcttgagctgcaagactgagccatcttaccattgctgagaagtcaactttgggggaccttggggtggtcacttgagtgtcagctcttaaggcgccagttgtgttaattcagggcaaagtttagatgctggctgtgagttacaggagggcttgctgactggcacggatgtgcacatgggactgtcagaaaggaactccacttgtgcttggggaaaaagaagctggaaccagaaagcctccactctcttctgataaccaggccatggcctgtgtcagcacccctagtcttcaggggtgaagctggccttgctggtaggggcgggggcactccaaggaccaagcacagctggggctggcgcggagtctggggtttgatggaatttctcactcattgaagtccacagggaaagtaaagggccagtggctgcaggttaaccaacgcacagacacgcacacaggcacacacacaaacacacacatgcacacaactcacacacatttttgcctgatcacatatgccttatacaagttgtaaaacaaaataaaatcaacaaggaaacaggtcagaactaacatttgctttactgaatgtatctcaagcacctccccacgtctgtgtgtgaagagcttctcattcttttcctgcgaaatatttgatatctatgcaagcgcatgtggcagatatggagactaaaagcctcatcaccaagttagcaacagcgacctatcacccagctccggagcctgccatggctatcctggcaaacctaacctcggacgcctctctcacctcctgtttccagaatggtgagaattaaagagcatttggggaatttcacgcccagtctggagatgtaactggagaggggagtcccagccctgtctggcatctctggctaaattgtttgttcaaagggaatggggatggcccagggtttgcaaatcgttcttaattcattctgattccctccttttaaaaaactagccctgcagcccttggggaaggggtgtgggtcaggcttcaggaggctgtgcagggaggccaggcctggggaagctggagggagagacgcccacctaccacccagagactggcgggcctcctgctggaggagaccccgaggggcttaaagaagccaggcaggagaatcagggccccagctcagctcttctccgagagcagccgatcaggaatgccttctccctgcgccagctgtcactcccaaggggatgccttctttggtttcctttttattgcagaggggccaccagggagtgggcaggagtgaggggtgagagcctgggggccgcagagccaaacttcgcctgattaataaccccagatgttcccgtccaagcacatggaggtcccgggagctcttgggaagtcagaccccagctcggtcccgtgccaatctgcagttaggaggcaggtcctcggtccgggttgacacgtaggccacagtcttgggcgccctgatctggctggatgggaagtttagtctccacccagaagaggagctctgaactcctccacgttaaagaaaaagttaggcggggtaaactgcaactttctttttaacccgaagtgatcaaacctcggggcccctctgcactggttcttggagcatggccaggtgcgggcacctggggtgggaacagtggggggaccagggtgggcccctgggctccgaggccgccccaggcccgcccgcctaccggctctcagagaaagaacagggggccgcgcccgccccacgtccgctccgccccgggccagccccttcctcgctgcgactcgcccgctgtccccaccccctcgcccgcggcgcccagtgggaggcgggggctggcctcgccgagcccagcgccgggctctgatttgctgcgggcgttggggatcgacagcctccgcggctgccttccaggagagagggagggaggaaaagggggaaaaaagtgctcggcgccgaaggcgaggtccgcactctccgtccccgcggctggcgcaggacctcactcgagcggagcgcccacggggagcgggtcgcggggcggcggcggcgaggaggaggcgagaaggagttggaggaggaggaggaggaggcgagggcgagcgagcccagcggggtcccggccgccccgcgggccaaagtcgagccctcccgcccgtgggcgagcgcgccagccgccccttccagaacagccgccgccacaaagaagaacggggggtgccgaggtccccatgacctcctaaagtggtgcggtccctgctgagtgcgctgcccgggccgtgacccgcgcccctgtgcgtccccgcgcgcctccgagcgcccctgtgcgccccggcccgcgccccgccggcatggacgtccatacccgctggaaagcgcgcagcgcgctccgcccgggcgccccgctgctgcccccgctgctgctgctgctgctgtgggcgccgcctccgagccgcgcaggtaagggcgccccgggggcggggctgcgggatggggcgcagcccgggcgccgctgtcatccccgggcgccttcgcccgcagaacttttcttccttggcctgtggaatgcacgggccaagaccacgaatgccatttgctgggggcccccccgagatgacgacacgcagacacaatgcccgcgggcgcgccgccgccccctccccagacgggcgggtcgggtggggatgtcgcgcgagccgaggaaggaccgagggctggatcagcaggaggggttgtccacgaggcgggcaaacttttgtcccaaaaaccttccttctctgtcccacatcacaggcgcccagcttgggccctcacagccctacagcagaacttcctctgctccaaaccgggcagggccgccccctagagttacagcccttcaaatcccgggactcctggggatggggggaatcccagaagcctgggcccccagcactgaacttcccccaggcactgtcactctaggctgagctggcgccctgctttccccagggacagcgtttcctgcagccttggtcacctaagtgttcggggggcactggggaccctgcagggtggtagacagccctgctcctaatcccacccccaaacttcttgatccctggaaggcagcttttcctggattcgctgctgagagatgggatgcgtggagcaaagccagagatgggcttgcaggcgggggctgtgagtggttgggatgatatgcagatgtgggattccttctgccaagggtcagcccttagaaggaggcttgcttcccggggagggcgcttcaaggcggggactgtctgcgtccctgcctgggttctcgag

SEQ ID NO: 988 - DNA, 7138 bp, Homo sapiens
gccgccccgcgggccaaagtcgagccctcccgcccgtgggcgagcgcgccagccgccccttccagaacagccgccgccacaaagaagaacggggggtgccgaggtccccatgacctcctaaagtggtgcggtccctgctgagtgcgctgcccgggccgtgacccgcgcccctgtgcgtccccgcgcgcctccgagcgcccctgtgcgccccggcccgcgccccgccggcatggacgtccatacccgctggaaagcgcgcagcgcgctccgcccgggcgccccgctgctgcccccgctgctgctgctgctgctgtgggcgccgcctccgagccgcgcagctcagccagcagatctcctgaaggttctagattttcacaacttgcctgatggaataacaaagacaacaggcttttgcgccacgcggcgatcttccaaaggcccggatgtcgcttacagagtcaccaaagacgcgcacgtcagcgcacccaccaagcagctgtaccctgcgtctgcatttcccgaggacttctccatcctaacaactgtgaaagccaagaaaggcagccaggccttcctggtctccatctacaacgagcagggtatccagcagattgggctggagctgggccgctctcccgtcttcctctacgaggaccacacggggaagcctggcccggaagactaccccctcttccggggcatcaacctgtcagatggcaagtggcacagaattgctctcagcgtccacaagaaaaatgtcaccttgatcctcgactgtaaaaagaagaccaccaaattcctcgaccgcagcgaccaccccatgatcgacatcaatggcatcatcgtgtttggcacccggatcctggatgaggaggtgtttgagggtgacatccagcagctgctctttgtctcggaccaccgggcagcttatgattactgtgagcactacagccctgactgtgacaccgcagtacctgacaccccacagtcgcaggaccccaatccagatgaatattacacggaaggagacggcgagggtgagacctattactacgaatacccctactacgaagaccccgaagacctagggaaggagcccacccccagcaagaagcccgtggaagctgccaaagaaaccacagaggtccccgaggagctgaccccgacccccacggaagctgctcccatgcctgaaaccagtgaaggggctgggaaggaagaggacgtcggcatcggggactatgactacgtgcccagtgaggactactacacgccctcaccgtatgatgacctcacctatggcgagggggaggagaaccctgaccagcccacagacccaggcgctggggccgaaattcccaccagcaccgccgacacctccaactcctccaatccacgtccgcctccaggggaaggtgcggatgacttggagggggagttcactgaggaaacgatccggaaccttgacgagaactactacgacccctactacgaccccaccagctccccgtcggagatcgggccgggaatgccggcgaaccaggataccatctatgaagggattggaggacctcggggcgagaaaggccaaaagggagaaccagcgattatcgagccgggcatgctcatcgagggcccgcctggcccagaaggccccgcgggtcttcccggacctccaggaaccatgggtcccactggccaagtcggggaccctggagaaaggggcccccctggacgcccaggccttcctggggccgatggcctgcccggtcctccaggaaccatgctcatgctgcccttccggtttggaggtggcggcgatgcgggctccaaaggccccatggtctcagcccaggagtcccaggcgcaagccattctccagcaggccaggttggcactgaggggaccagctggcccgatgggtctcacagggagacctggccctgtgggtccccctgggagcggaggtttgaagggcgagccgggagacgtggggcctcagggtcctcgaggtgtgcaaggcccgcctggtccggccgggaagcccggaagacggggtcgggctgggagtgatggagccagaggaatgcctggacaaactggccccaagggtgaccggggtttcgacggcctggctgggttgccaggcgagaagggccacaggggtgaccctggtccttccggcccaccaggacctccgggagacgatggagaaaggggtgacgacggagaagttgggcccagggggctgcctggggagcccgggccacgtggtctgcttgggccgaaggggcccccaggccctcccggacctcccggtgtcacgggtatggacggccagccggggccaaaaggaaatgtgggtccccagggagagcctggccccccaggacagcagggtaatccaggcgcccagggtcttccaggcccccagggtgcaattggtcctccaggagaaaagggtcccttggggaaaccaggccttccaggaatgcccggtgctgacggacccccgggacaccctggcaaagaaggccctccaggagagaaaggaggtcagggtccacctggcccccagggtccgattggctacccaggtcctcgaggagtcaagggggccgatggcatccgtggtctgaagggcacaaagggcgagaagggtgaagacggctttcctgggtttaaaggagacatgggcatcaagggtgatcggggggagatcggcccacccggtcccaggggagaagatggccctgaaggcccaaagggtcgcggaggtcccaatggtgaccccggtcctctgggaccccctggggagaagggaaaactcggagtcccagggttaccagggtatccaggaagacaaggaccaaagggctctattggattccctggatttcctggcgccaatggagagaagggcggcagggggacccctggaaagccaggaccgcgggggcagcgaggcccaacgggtccgaggggtgaaagaggcccccggggcatcactgggaagcctggccccaagggcaactccggaggtgacggcccagctggccctcctggtgaacggggacccaatggaccccaaggacccacaggatttcctggaccaaagggcccccctggccctccaggcaaggatggactcccaggacaccctggacagagaggcgagactggtttccaaggcaagaccggccctccaggcccccccggcgtggtcggccctcagggtcccacgggagaaacgggcccaatgggtgagcgtggccaccctgggccccctggaccccccggtgaacaggggcttccgggccttgctggaaaagaagggacgaagggtgacccaggccctgcaggcctccctgggaaagacggccctccaggattacgtggtttccctggggaccgagggcttcctggtccagtgggagctcttggactgaaaggcaatgaagggccccctggcccaccaggccctgcgggatctccaggggagagaggtccagctggagccgctgggcccatcggaattccagggagacctgggccccagggacccccagggccggcaggagagaaaggggctcctggcgagaaaggcccacaaggcccagctggccgagacggtctccaggggcctgtggggctcccgggtccagctggccctgtgggtccccctggagaagacggagataagggagagatcggggagccggggcagaaaggaagcaagggggacaaaggagaacagggtcctcctgggcctacaggtcctcaaggccccatcggacagccaggcccctctggagctgacggcgagccggggcctcggggccagcagggccttttcgggcagaaaggtgatgaaggtcccagaggctttcctggaccccctgggccagtggggctgcagggtttgccaggacctccaggcgagaagggtgagacaggagacgtgggccagatgggccccccgggtccccctggcccccgaggaccctccggagctccaggtgctgatggcccacaaggtcccccaggtggaataggaaaccctggtgcagtgggagagaagggcgagcctggcgaagcaggtgagcctggccttccgggagaaggcggccccccgggacccaaaggagaaaggggagagaagggcgagtcaggcccttcaggtgctgccggaccccctggacccaaaggccctcccggagatgatggtcccaaaggcagccctggcccagtgggttttcctggagatcctggcccccccggagagcctggccccgcgggtcaagatggtccccctggtgacaaaggagatgatggtgaacccgggcagacgggatcccccggccctactggtgaaccaggtccatcggggcctccaggaaaaaggggtcccccaggccccgcaggccccgaaggcagacagggagagaaaggggccaagggagaagccggcttggaaggccctcctgggaagactggccccatcggcccccagggggcccctgggaagcccggaccggatggccttcgagggatccctggccctgtgggagaacaaggtctcccaggatccccaggcccggacggtccccccggccccatgggtcccccaggacttcccggcctcaaaggagattctggtcccaaaggtgaaaagggtcatccaggcctgatcgggctcatcggtcctcccggtgaacagggtgagaagggcgaccgtggtctccctggcccccagggctcctccggtcctaagggagaacagggtatcactggtccttctggcccgattgggcctcctgggccccctggcctgccgggtccgcctggtccaaaaggtgctaagggctcctcgggtccaactggcccgaagggtgaggcaggccacccaggacccccaggccccccgggccccccgggagaggtcatccagcccctgccaatccaggcatccaggacgcggcggaacatcgacgccagccagctgctggacgacgggaatggcgagaactacgtggactacgcggacggcatggaagagatcttcggctctctcaactctctgaagctggagattgagcagatgaaacggcccctgggcacgcagcagaaccccgcccgcacctgcaaggacctgcagctctgccaccccgacttcccagatggtgaatactgggtcgatcctaaccaaggatgctccagggattccttcaaggtttactgcaacttcacagccggggggtcgacatgcgtcttccctgacaagaagtccgaaggggccagaatcacttcttggcccaaagaaaacccgggctcctggttcagtgaattcaagcgtgggaaactgctctcctatgtggacgccgagggcaaccctgtgggtgtggtacagatgaccttcctgcggctgctgagcgcctctgcccaccagaacgtcacctaccactgctaccagtcagtggcctggcaggacgcagccacgggcagctacgacaaggccctccgcttcctgggctccaacgacgaggagatgtcctatgacaacaacccctacatccgcgccctggtggacggctgtgctaccaagaaaggctaccagaagacggttctggagatcgacacccccaaagtggagcaggtgcccatcgcggacatcatgttcaatgacttcggtgaagcgtcacagaaatttggatttgaagtggggccggcttgcttcatgggctaggagccgccgagcccgggctcccgagagcaacctcgtacctcagcatgccattgcttcgtgagtgtcccgtgcacgtcctgatcctggacagtgaaggcttctccctcccctcccacctgacttcatctacgcctcggcaccacggggtgtgggaccccagcccggagagaacagagggaaggagccgcgcccccacctggagctgaatcacatgacctagctgcaccccagcgcctgggcccgccccacgctctgtccacacccatgcgccccgggagcggggccatgcctccagccccccagctcgcccgacccatcctgttcgtgaataggtctcaggggttgggggagggactgccagatttggacactatatttttttctaaattcaacttgaagatgtgtatttcccctgaccttcaaaaaatgttccaaggtaagcctcgtaaaggtcatcccaccatcaccaaagcctccgtttttaacaacctccaacacgatccatttagaggccaaatgtcattctgcaggtgccttcccgatggattaaaggtgcttatgtttttgtgagttttaagtaaatatttgtggaatttaagatgaagacagtaatataatattttggtacaaaaacagctgcaggaagaggtggaggggggcctgtcattatgtttcccccccaccccccaacgaaaggaaaactaagactcccaacataaacagggccttgaagggggggattacaggcacttgggcatggagtcttcggctgcaggaagcactccgcttattcttcaggaatgggaaaggcgtgacccaacgagagcatctgtctcagagctccactcagggtcacccctctccagaggccggtatggggtggcttcagacttccactgcacgacctggagcaccaagaccacacaccacaataccaaattcacccaagaagaggtctaattgtagtgttcaaggagatgatggagttgcagagagacctggtgccaaatcgaaggatacaggcagacaccaagaccaggaagacggctatagctgagatggccagtgcaatgcgcagccctatagcacctctgtgggagtcctcgatgcagctgctgtagatccagaagagcaaaagcaggaggcagtagagggccaagaggccagaggccccagctacaaagtagcacagggatggtgctgagggacgggataaggccagggaggagccattcagggtggccacaccatacaggggacatctaccactgaaggagccctgggtccgagtcatcgccgcggccgccacggccccgcacaggaaggcggcagcaaagagcgcaagctcgacgcgctgcagccaggacagcgccatggcgccctgaccaccag

SEQ ID NO: 989 - DNA, 129 bp, Homo sapiens
gaataataccactgtgtttcgtgaattaggttctcagaggcactgtgactgacttccctggatttgatgagcgggctgatgcagaaactcttcggaaggctatgaaaggcttgggtaaatttagcttcc

SEQ ID NO: 990 - DNA, 149 bp, Homo sapiens
ggagccaaaagtaattgttaaccataaattgcaggcacagatgaggagagcatcctgactctgttgacatcccgaagtaatgctcagcgccaggaaatctctgcagcttttaagactctgtttggcagggtaagaccacacttcatccc

SEQ ID NO: 991 - DNA, 268 bp, Homo sapiens
cattcatatttaagaagaatcttattacaatttcttgtacggttaacaaatttgtattttctgtgggttaggatcttctggatgacctgaaatcagaactaactggaaaatttgaaaaattaattgtggctctgatgaaaccctctcggctttatgatgcttatgaactgaaacatgccttgaaggtaaaaaggatgagtgaaaggaacattcttgcatagatagtattattttgttttggtaattacttcctcttatttgttatatt

SEQ ID NO: 992 - DNA, 242 bp, Homo sapiens
ttaatcttattgacatgttttctctataaaatctccaaacagggagctggaacaaatgaaaaagtactgacagaaattattgcttcaaggacacctgaagaactgagagccatcaaacaagtttatgaagaaggtaaatgtttgtgagttatattttgacttcacctccactatcacttccttcatttctgtgatttgaatgcagtcctttgtaggtatgggaggcacgcagtaaatgatgg

SEQ ID NO: 993 - DNA, 123 bp, Homo sapiens
gaaattattttgttgcagaatatggctcaagcctggaagatgacgtggtgggggacacttcagggtactaccagcggatgttggtggttctccttcaggtatgcgtggagattaattacgttt

SEQ ID NO: 994 - DNA, 154 bp, Homo sapiens
ccatttttccttttgaatgagaatgctctatagttcagtaatgtgacatattacctctcataggctaacagagaccctgatgctggaattgatgaagctcaagttgaacaagatgctcaggtgagtgacaccaggatatatatgactttattat

SEQ ID NO: 995 - DNA, 255 bp, Homo sapiens
gatgtgaatcaagtgagttaaaattcaggggagtaaaaaacaagtgtgtttaagaacctggaaatgagatggaggaacaatttattaattgagtttgaaatttttgcaggctttatttcaggctggagaacttaaatgggggacagatgaagaaaagtttatcaccatctttggaacacgaagtgtgtctcatttgagaaagggtgagtaaaaaatctgtatggggcagatccttggtaatttggaaagtgcata

SEQ ID NO: 996 - DNA, 153 bp, Homo sapiens
atccctactgattagggaatatttttatcttttctagtgtttgacaagtacatgactatatcaggatttcaaattgaggaaaccattgaccgcgagacttctggcaatttagagcaactactccttgctgttggtaggtgattacagtctatg

SEQ ID NO: 997 - DNA, 656 bp, Homo sapiens
ttttatagaagtagagctataagcaggaagcagcacttgatttttaattacttaatcctttacatatcaaaatagcatttgaccattgtattgtttattttcttagtgaaatctattcgaagtatacctgcctaccttgcagagaccctctattatgctatgaaggtaagtggagaccatgaaggttctatctaatacatttctctttctaattatattcttcacttttgtttatgttttagatgatagaccttgggaatttttcccttataacattcaacccagttctacaaagttgttataccttattgattcacccgcacccgggagcatttgatccattgttgaagttttaagcatttgcttctctcttttttttttttttttaaagggagctgggacagatgatcataccctcatcagagtcatggtttccaggagtgagattgatctgtttaacatcaggaaggagtttaggaagaattttgccacctctctttattccatgattaaggtagtagaacctttctttaaattacgtttgggaatcctttgcagactggtatgttgcatgaaaagacaaggataagagaacctgattcttgtgttaagtttaaaattttagtgacacgttagagcaatgagttaaaaagctt

SEQ ID NO: 998 - DNA, 565 bp, Homo sapiens
tggaggttaatggaatacatttggtttcagggagatacatctggggactataagaaagctcttctgctgctctgtggagaagatgactaacgtgtcacggggaagagctccctgctgtgtgcctgcaccaccccactgccttccttcagcacctttagctgcatttgtatgccagtgcttaacacattgccttattcatactagcatgctcatgaccaacacatacacgtcatagaagaaaatagtggtgcttctttctgatctctagtggagatctctttgactgctgtagtactaaagtgtacttaatgttactaagtttaatgcctggccattttccatttatatatattttttaagaggctagagtgcttttagccttttttaaaaactccatttatattacatttgtaaccatgatactttaattagaagcttagccttgaaattgtgaactcttggaaatgttattagtgaagttcgcaactaaactaaacctgtaaaattatgatgattgtattcaaaagattaatgaaaaataaacatttctgtccccctgaattat

SEQ ID NO: 999 - DNA, 1592 bp, Homo sapiens
ttggatcagtctaggtgcagctgccggatccttcagcgtctgcatctcggcgtcgcccgcgtaccgtcgcccggctctccgccgctctcccggggtttcggggcacttgggtcccacagtctggtcctgcttcaccttcccctgacctgagtagtcgccatggcacaggttctcagaggcactgtgactgacttccctggatttgatgagcgggctgatgcagaaactcttcggaaggctatgaaaggcttgggcacagatgaggagagcatcctgactctgttgacatcccgaagtaatgctcagcgccaggaaatctctgcagcttttaagactctgtttggcagggatcttctggatgacctgaaatcagaactaactggaaaatttgaaaaattaattgtggctctgatgaaaccctctcggctttatgatgcttatgaactgaaacatgccttgaagggagctggaacaaatgaaaaagtactgacagaaattattgcttcaaggacacctgaagaactgagagccatcaaacaagtttatgaagaagaatatggctcaagcctggaagatgacgtggtgggggacacttcagggtactaccagcggatgttggtggttctccttcaggctaacagagaccctgatgctggaattgatgaagctcaagttgaacaagatgctcaggctttatttcaggctggagaacttaaatgggggacagatgaagaaaagtttatcaccatctttggaacacgaagtgtgtctcatttgagaaaggtgtttgacaagtacatgactatatcaggatttcaaattgaggaaaccattgaccgcgagacttctggcaatttagagcaactactccttgctgttgtgaaatctattcgaagtatacctgcctaccttgcagagaccctctattatgctatgaagggagctgggacagatgatcataccctcatcagagtcatggtttccaggagtgagattgatctgtttaacatcaggaaggagtttaggaagaattttgccacctctctttattccatgattaagggagatacatctggggactataagaaagctcttctgctgctctgtggagaagatgactaacgtgtcacggggaagagctccctgctgtgtgcctgcaccaccccactgccttccttcagcacctttagctgcatttgtatgccagtgcttaacacattgccttattcatactagcatgctcatgaccaacacatacacgtcatagaatgaaaatagtggtgcttctttctgatctctagtggagatctctttgactgctgtagtactaaagtgtacttaatgttactaagtttaatgcctggccattttccatttatatatattttttaagaggctagagtgcttttagccttttttaaaaactccatttatattacatttgtaaccatgatactttaatcagaagcttagccttgaaattgtgaactcttggaaatgttattagtgaagttcgcaactaaactaaacctgtaaaattatgatgattgtattcaaaagattaatgaaaaataaacatttctgtccccctg

SEQ ID NO: 1000 - DNA, 1035 bp, Homo sapiens
gtgggtgagcggcggccacggcatcctgtgctgtgggggctacgaggaaagatctaattatcatggacctgcgacagtttcttatgtgcctgtccctgtgcacagcctttgccttgagcaaacccacagaaaagaaggaccgtgtacatcatgagcctcagctcagtgacaaggttcacaatgatgctcagagttttgattatgaccatgatgccttcttgggtgctgaagaagcaaagacctttgatcagctgacaccagaagagagcaaggaaaggcttggaaagattgtaagtaaaatagatggcgacaaggacgggtttgtcactgtggatgagctcaaagactggattaaatttgcacaaaagcgctggatttacgaggatgtagagcgacagtggaaggggcatgacctcaatgaggacggcctcgtttcctgggaggagtataaaaatgccacctacggctacgttttagatgatccagatcctgatgatggatttaactataaacagatgatggttagagatgagcggaggtttaaaatggcagacaaggatggagacctcattgccaccaaggaggagttcacagctttcctgcaccctgaggagtatgactacatgaaagatatagtagtacaggaaacaatggaagatatagataagaatgctgatggtctcattgatctagaagagtatattggtgacatgtacagccatgatgggaatactgatgagccagaatgggtaaagacagagcgagagcagtttgttgagtttcgggataagaaccgtgatgggaagatggacaaggaagagaccaaagactggatccttccctcagactatgatcatgcagaggcagaagccaggcacctggtctatgaatcagaccaaaacaaggatggcaagcttaccaaggaggagatcgttgacaagtatgacttatttgttggcagccaggccacagattttggggaggccttagtacggcatgatgagttctgagctacggaggaaccctcatttcctc

SEQ ID NO: 1001 - DNA, 771 bp, Homo sapiens
tcatatgggaaaacgtgtaaatttttcatgaataaattcctttcggtattggtaatttccttctctgttttagtataaaagaaagcattgccttataggtggctaagaacatctgtagcatacataacacttaatctaaaggagtgttgaagaccgggctgattcctaattgagaatgagcaagaatagaactctttttgatagttatccctgttcttcctccaagcctctgccttggagctatggatactataactaactgaagcttcttctttcaggtacccactgatggtaatgctggcctgctggctgaaccccagattgccatgttctgtggcagactgaacatgcacatgaatgtccagaatgggaagtgggattcagatccatcagggaccaaaacctgcattgataccaaggaaggcatcctgcagtattgccaagaagtaagtcctgtccggtggctagcaattcacgttggatcacatgcatttgttttcaaaaaatttaacttcttgtattttgcatcagtattttaaccctacagtaaaaatcttggttcctaatgattcaccataccattaatatatttatttgcattaccctatgatatacatataaatgtttttaaaattatgatgtcgtattatgaccatcactaaacagtagtttaagatgtcacagcacttttttttttcctcactctgtcacccaggttggagtgcagtggcaagattatggcttactgtagccttgacctactgggctcaa

SEQ ID NO: 1002 - DNA, 604 bp, Homo sapiens
ggagtattttggattttggactttccggattccagatgctcaaccagtaagtatataatgcagatgttctaaaatcggaaaaagtcagagaccttgaaagcacttctggtcccaagcattttggataagggacactccacctgtaccttacagtggaggcttgttagatgcttgtaaatgccagcccctgcctcaagtaacaattgattctttttgtgtgctctcccaggtctaccctgaactgcagatcaccaatgtggtagaagccaaccaaccagtgaccatccagaactggtgcaagcggggccgcaagcagtgcaagacccatccccactttgtgattccctaccgctgcttaggtgagccggccggccgtggggctggtgttgattgggggcctggtcttgagggaagaaaaagaggatgctcctgttaggtcacatacacagacttgttcttcagcacattgccactctgtgttgtactgtgttttggactcttgcagttacattctgtgcactgaccctataggagcagtatttttgagttccctgcctcagaatgaatttacccagggtgtatattgaaattacaaattcctggg

SEQ ID NO: 1003 - DNA, 249 bp, Homo sapiens
tcttgattgggttgcttaggcattaaaaggctgtttaacttgtcttgaagtctatctttccttgatgtcttctgcggtaagaacactgtgatacagatggaatgacgggaagtggttttcctttctttcagttggtgagtttgtaagtgatgcccttctcgttcctgacaagtgcaaattcttacaccaggagaggatggatgtttgcgaaactcatcttcactggcacaccgtcgccaaagaggtacc

SEQ ID NO: 1004 - DNA, 910 bp, Homo sapiens
aggattgttactctgaaagtgaaccaagagagtcagaatttctaggataaggcaggtccatgtgagataaacttccatctgtaagggaggtaggagtgagctggggatctacctggaatgcgcacaatttctggatacacgaattaagccagaaggcattaattctctggtatctgttcaccagtggagactgctacatcttatttcccaattagtttccattccagttgttcgtataaacctctattatataacatcgtggtcttattaaataaataataaacttaagaataaaaagagtaccaaagtgtaacccatgctaaaaaaaatcctgttgtaaattcactcaaaaagcaaataatcttttcctttgtgaaattggttcctaatatattgggtctgcatgttgattattttatgtggagttttcttaaaatgaaacacatctactctaccactcactgttttctccttacactttgtagacatgcagtgagaagagtaccaacttgcatgactacggcatgttgctgccctgcggaattgacaagttccgaggggtagagtttgtgtgttgcccactggctgaagaaagtgacaatgtggattctgctgatgcggaggaggatgactcggatgtctggtggggcggagcagacacagactatgcagatgggaggtaaggtggcctttgtgttcagcctcagagatgctgaaacatcttgtatggagtatttgtatcctgtaaattaatctttctgtttatcactgaaaaggtctctgcccactcccatcagagtctgctgttatgcaaaaatctgaactatgaatttttatggcatcctgttgaattaataatatcaatcacccatcacagagttaattttaactatttaatattaaacttggg

SEQ ID NO: 1005 - DNA, 745 bp, Homo sapiens
ctgcagaaactaagaactgtccccaaggataaaaatttttgcagacccactgagctgggatttatacttagacctgctgaattgaagttttgggtgtgtttcttctcaaattgccaaaattccatatggacgacttttcttttccttccctgaaatgtgtttaattgactttttctgttatttgtgtttgccttcacagtgaagacaaagtagtagaagtagcagaggaggaagaagtggctgaggtggaagaagaagaagccgatgatgacgaggacgatgaggatggtgatgaggtagaggaagaggctgaggaaccctacgaagaagccacagagagaaccaccagcattgccaccaccaccaccaccaccacagagtctgtggaagaggtggttcgaggtaatccaccatttgcttggattccccccacccccaaggaaaagaaagcgtaataccagagttggaaatatccaccctagcaccactgccttccccaatcaaaaacatgtttttttttccaaaaggcttcttatgcttgtgaaatttttttggtttaacaagcaaacaatttcaaataatgtgaaatctttattatacagtttgttttgtaccttgtatatgctgcttggcaaatcccaagttaattctacaagactccgcccaaccaggtagtcatctaatttgacaaacactgagttaggtgactccttggtattcctttggcagtgagtgtttgttatat

SEQ ID NO: 1006 - DNA, 669 bp, Homo sapiens
tgagaggtgtaaatctctagtcctggtggccagttaaattcctcagtaaatgtttggtagatgctgcctaataaaccagtccaggttgccactgggaggattaaaagaagtaaacgtgtatacatgaacagagagacagtgccttttcatgctaaatgtggttccccacatctcctctgattagaggtgtgctctgaacaagccgagacggggccgtgccgagcaatgatctcccgctggtactttgatgtgactgaagggaagtgtgccccattcttttacggcggatgtggcggcaaccggaacaactttgacacagaagagtactgcatggccgtgtgtggcagcgccagtaagtggacccttcttcgagcctggccacctttcgtctctctcgccactgactctgctttttgtaacagattgattttcctggttcttgggaatgggcctgttgctaccactaaccacatttctgtccacttctctaattgctcagagtctccgcagtatgttcaatcatgagcacacctctccgtctttccctgataaagcatggccatggatgtgttctcttcctagctgtagcacatatgtcttgcaatccagagggacttttgagtgcttctcttttaaacaaagctggagtggctgttttgtcttctgcag

SEQ ID NO: 1007 - DNA, 413 bp, Homo sapiens
atgtttatatgttcattttggttttgttggagggaccaaacctaagtgagtgattttgtttgttaggttgtttttttgtcagtggactcgtgcatttcagccatcattcccatgtttctctttttgtttttagttatgttctcttattttttccatagtgtcccaaagtttactcaagactacccaggaacctcttgcccgagatcctgttaaacgtacgttgtcattcacctgagggaagggaagaggggaggaggatgctgcttggttcacataactccagcatcatcaccttctttgcatggttttgtgtttcttgaacacctgtcttagtaaaatgtttcttcccattaccttgcttgtaattacatctgattttgccagacagcttgagatgttgggctaagaacatc

SEQ ID NO: 1008 - DNA, 639 bp, Homo sapiens
tcttcagcaccaactgtttttgctctttgcatgcttgtttcgtaaagaactctaatgctataattgcaaaatggaccattttaaagatttttccttcattctgtacttgggagtggtgaaagacatccttactgtgctgcacagtgtctcatggtgttctcttaaacagcattaacgtcttgtatgcgctgctttactaaattctctgttctgagaaataactgaaaatacggctttctattaaacgagtggattattctgttgttgttggcttttttttctcaaacctccttctcttctactttatagttcctacaacagcagccagtacccctgatgccgttgacaagtatctcgagacacctggggatgagaatgaacatgcccatttccagaaagccaaagagaggcttgaggccaagcaccgagagagaatgtcccaggtaagtctggctcttccatcattcagccctacgatattgggaaacctgagcttgcctctgcctcagtctccccacaggcctgctggctttatcaagatctttaaagatgtaaagttctaattttaaatgtttactgtgtgggcacagtttgtgggttttttgcatcctccgtgaacatgctgcctaggaaggatcc

SEQ ID NO: 1009 - DNA, 468 bp, Homo sapiens
ggggtaaaaaaagaccaaccttgactcaaaaagctatattcctgcaataaatatgaacatttatgtttaatatactgctgtgattaattatttatatcctagtgggaggtcaaatattcttcagataggaaggggtatgtaataaattttttaaatatctaaaatgacaaaaatagaggaaaaacataatcatccatcctattaagtctgtattcaaaggatgaactgatgattttaaattcaaatgtttccttaatttataggtcatgagagaatgggaagaggcagaacgtcaagcaaagaacttgcctaaagctgataagaaggcagttatccaggtaaaacctgaacccatttcctaccaaacatcacatgccagcagtctttttaatgagtgtctgcaggtttacctttatctgccagcacctcacgtgtgattgttcatagtcccatgaacttcagctgttc

SEQ ID NO: 1010 - DNA, 742 bp, Homo sapiens
tttttttttaatatgtaatataagagtttcaagagtgcatatatttatccaaagttattagtcaaatcagccttcagagagcctatgaaatactgattttcaatgagaaagtaggtttgatgagggttggagagtgcaagaaagtgaagtaagctataaaacgtagaattagtcaatgttggaatgactatgcagtctttaggatactttttagcactagaagaaaatggaataggatgtcttttttagaagacttgaaattgctgcttcatcctacttattcagtccccatggacatatgtgtttatgatggcagcatttccaggagaaagtggaatctttggaacaggaagcagccaacgagagacagcagctggtggagacacacatggccagagtggaagccatgctcaatgaccgccgccgcctggccctggagaactacatcaccgctctgcaggctgttcctcctcgggtaggtctcgctgcagccgagttcacacttcaggtcacagcacagacagtaagggtggggcactgggaactggaagccatacaaaaagaatgaggagaaatgccttgagcactgttattcagaggttcaacccctgtccattccatcttgaaggtcaaagggtcacagggcagctacctccacaaggtcatctctacacagcaggtactcacacttccccacagagcagccagacaggactcccagggactcacattgcaagccctg

SEQ ID NO: 1011 - DNA, 488 bp, Homo sapiens
ctcttgtggaagtgaaaagcagccgatctaagtaattacccattaagaaaggagtaggagaaatgtttagaaggcagacctgcaaaaaggtgactcacagtgcgttcacatgaccggatgcattagtggaacctctaacccatcgccaatggaagaagcagtgttttgcacaaacttgaaaaagagtttttcattttcctcccacagcctcgtcacgtgttcaatatgctaaagaagtatgtccgcgcagaacagaaggacagacagcacaccctaaagcatttcgagcatgtgcgcatggtggatcccaagaaagccgctcagatccggtcccaggtaagcgtggggtataatcatcttctgcagctttgacaatccaggattcttgcttcttgggttggtgacaggatcccaggcattctccgagcacctataggtgttttccctatggcaagagctctttaacttctggtaaattctaaaagctt

SEQ ID NO: 1012 - DNA, 413 bp, Homo sapiens
ctccgtctcaaaaaaaaaagaaaaaaagaaagaaaaagaaccattcctacccccagacattgttgacctggagttgtcatcctttgatgcaggttatgacacacctccgtgtgatttatgagcgcatgaatcagtctctctccctgctctacaacgtgcctgcagtggccgaggagattcaggatgaagttggtaagtaagctgttcttttgatgctgcacatggacatgtatttttccccagaggaaaattgaggaagtgagttatctgtttgaggaatatggaagttaatagaacagcttgccttttacgatgaaactgtcaggctggaactagctttctagccttagcaattgaatcagttcttacctctccatacttgtaagactggaggaatgtcgcctgacttaggg

SEQ ID NO: 1013 - DNA, 1037 bp, Homo sapiens
ggatccttttgacacacaaaaattttcaatttagaagtctattttatcagttttttcttttgtggcagttactatggtatggtatctaggaaaccattgtccgaaacaaggttacaacgatttatacctgttaccttctaagagttttgtagttttagctcttacagttaaatctttgattcattttaattttcatatatggtgtgaggtagaggtttgactttattcttttgcatataaatatccagtgtcccagcaccatttgttgaaaaagactattcttgccaggtgcagtggctcatgcctgtaattccagcattttgggaggccaaggtgggcagatgacttgagcccagaagttcaagaccagattgggaaacatggcaagaccacatttctacaaaaaaattatccaggcatgataacatctatttgtagtcccagctactcaggaggctgtggtgggaggatctcccgagcctggggtggctgaggctgcagtgagccttgatcacgccacctgggcaatagagcaagaccctgtctcaaaaaaaggaagaaaaagactattatttcccccattgaatggtcttggcactattacacaaaatcaattgtccatagataatatgggtttatttcttaattcttagttcttttctttgatctgtgtgcctgtgcttactgtagtaccacactgttttgattattgtagctttgtagtaaattttgaaatcagcaagtgtgagtccgttatctttgttcttctttttcaatattactttgagtatccggagtctcttgcattacaacatgaattttaagatcttcctcaccccctgcccccactaccatttctgcaaaaaaaaaaaaaaaaaaaaaaaaaaaagtgcggattgcattggatctgtagatcattttggggaatatttatatataatgttaatgaggttttaaacaacacttttatctactagaactgatatttgcctcgaaatgattccaccttgagccccattcaggaacgttagtatttt

SEQ ID NO: 1014 - DNA, 577 bp, Homo sapiens
ctgcagtcctgccagcagctcttgtgagctgcgactttgcataagtagcttgaatgccatgtgcctcagttttcacatctgtaaaagggagatgataatggtacctatgtcatggctctaaacgcgatcatgcacgtgaaagcagttgaagtcttgcctggcagaagtaaatggtggctgctgctgctgctgctgttgtgattgttgttactcaccaaagagatggttttgtttggtttagatgagctgcttcagaaagagcaaaactattcagatgacgtcttggccaacatgattagtgaaccaaggatcagttacggaaacgatgctctcatgccatctttgaccgaaacgaaaaccaccgtggagctccttcccgtgaatggagagttcagcctggacgatctccagccgtggcattcttttggggctgactctgtgccagccaacacagaaaacgaaggtaagagtcccctgagccagcaagggcgttctgggaggtatatatacacatacataacgtgtgtgcaagagagagagttatcttttgtatgttcttgagtggtgaatttttttt

SEQ ID NO: 1015 - DNA, 534 bp, Homo sapiens
gcgtatcctggtgagggcttttattagaaaactaaggagcaggactggcacatcaatagcgataagccatttaaagtggtgcccctcctggtcctcgatgctcgggattaactcactgtggttcttttctggctgctccttttttgtaacttgtttattgcatatgcttttttccctgctcgactatgtttgggagccacgacttaccatcttgatttgtcttgtttgctttctgtgtcccttgcttcctgtgcccagttgagcctgttgatgcccgccctgctgccgaccgaggactgaccactcgaccaggtatcagaaccgcttgacttgtgcctctccgcatcttgggcctaagctcgagcagacgttgtctcctttctgcattttaagcctctctcaattgtacttactgcagagtagaatttgaagtgaccttagaaaccaaacttttaaaaattccccttgactattccttactcttcatttcccaagttccgagtgaaatgattttttttgtttctgagctttccc

SEQ ID NO: 1016 - DNA, 553 bp, Homo sapiens
tagtaattgaagttttaaatatagggtatcatttttctttaagagtcatttatcaattttcttctaacttcaggcctagaaagaagttttgggtaggctttgtcttacagtgttattatttatgagtaaaactaattggttgtcctgcatactttaattatgatgtaatacaggttctgggttgacaaatatcaagacggaggagatctctgaagtgaagatggatgcagaattccgacatgactcaggatatgaagttcatcatcaaaaattggtacgtaaaataatttacctctttccactactgtttgtcttgccaaatgacctattaactctggttcatcctgtgctagaaatcaaattaaggaaaagataaaaatacaatgcttgcctataggattaccatgaaaacatgaagaaaataaataggctaggctgagcgcagtgctcaagcctgtaatcccagcactttgggaggccaaggcgggtggatcacgaggtcagaaattcgagaccagcctggccaatatggtgaaaccccatctctactaaa

SEQ ID NO: 1017 - DNA, 567 bp, Homo sapiens
ttttttttttttttttaaagtaagcatcaaatatttgaccaaccagttgggcagagaatatactgaaactttttatataacctcatccaaatgtcccctgcatttaagaaatgaaattcttctaattgcgtttataaattgtaaattatattgcatttagaaattaaaattctttttcttaatttgttttcaaggtgttctttgcagaagatgtgggttcaaacaaaggtgcaatcattggactcatggtgggcggtgttgtcatagcgacagtgatcgtcatcaccttggtgatgctgaagaagaaacagtacacatccattcatcatggtgtggtggaggtaggtaaacttgactgcatgtttccaagtgggaattaagactatgagagaattaggcttagctttttgctaagaactagctaagtatctcttttaaaaaacgaatcagtgtgcttccatgatgcttgggttacagttgttctttcttgttttggttttcattcattgcaacttaccgtgaatattctgctcaaggtattgagagtgtgtgttgttatctcaactt

SEQ ID NO: 1018 - DNA, 1607 bp, Homo sapiens
gttctgctccaagatgtcaaagtgggggagaaaattatgggtgttctacaatcttggcaaaagaagagtactgtactccttatctttttactgcttctccatgttcacccttaaaagattgatttttattttttactcagctctcctcttgtttttcaggttgacgccgctgtcaccccagaggagcgccacctgtccaagatgcagcagaacggctacgaaaatccaacctacaagttctttgagcagatgcagaactagacccccgccacagcagcctctgaagttggacagcaaaaccattgcttcactacccatcggtgtccatttatagaataatgtgggaagaaacaaacccgttttatgatttactcattatcgccttttgacagctgtgctgtaacacaagtagatgcctgaacttgaattaatccacacatcagtaatgtattctatctctctttacattttggtctctatactacattattaatgggttttgtgtactgtaaagaatttagctgtatcaaactagtgcatgaatagattctctcctgattatttatcacatagccccttagccagttgtatattattcttgtggtttgtgacccaattaagtcctactttacatatgctttaagaatcgatgggggatgcttcatgtgaacgtgggagttcagctgcttctcttgcctaagtattcctttcctgatcactatgcattttaaagttaaacatttttaagtatttcagatgctttagagagattttttttccatgactgcattttactgtacagattgctgcttctgctatatttgtgatataggaattaagaggatacacacgtttgtttcttcgtgcctgttttatgtgcacacattaggcattgagacttcaagcttttctttttttgtccacgtatctttgggtctttgataaagaaaagaatccctgttcattgtaagcacttttacggggcgggtggggaggggtgctctgctggtcttcaattaccaagaattctccaaaacaattttctgcaggatgattgtacagaatcattgcttatgacatgatcgctttctacactgtattacataaataaattaaataaaataaccccgggcaagacttttctttgaaggatgactacagacattaaataatcgaagtaattttgggtggggagaagaggcagattcaattttctttaaccagtctgaagtttcatttatgatacaaaagaagatgaaaatggaagtggcaatataaggggatgaggaaggcatgcctggacaaacccttcttttaagatgtgtcttcaatttgtataaaatggtgttttcatgtaaataaatacattcttggaggagcaccattgtgctggtgtgaatgattccatagtaacaatcttgaccatttactgacgtacagaccagtgagaagtcttcgcatgaagggtacccacacctgttgtgtcttaattgcaagtctgagtaggaagttggggccaacatgtgtctcccagtgctgggaaaatatttcatagacctaatttacagtctttacttgatctaaaacattttgctgccatattttgg

SEQ ID NO: 1019 - DNA, 8878 bp, Homo sapiens
gaattcatgccccttttgaaatagacttatgtcattgtcagaaaacataagcatttatggtatatcattaatgagtcacgattttagtggttgccttgtgagtaggtcaaatttactaagcttagatttgttttctcacatattctttcggagcttgtgtagtttccacattaatttaccagaaacaagatacacactctctttgaggagtgccctaacttcccatcattttgtccaattaaatgaattgaagaaatttaatgtttctaaactagaccaacaaagaataatagttgtatgacaagtaaataagctttgctgggaagatgttgcttaaatgataaaatggttcagccaacaagtgaaccaaaaattaaatattaactaaggaaaggtaaccatttctgaagtcattcctagcagaggactcagatatatataggattgaagatctctcagttaagtctacatgaaaaggatggtttcttggagcttccacaaacttaaaaccatgaaacatctattattgctactattgtgtgtttttctagttaagtcccaaggtgtcaacgacaatgaggaggtgaattttttaaagcattattatattattagtagtattattaatataagatgtaacataatcatattatgtgcttattttaatgaaattagcattgcttatagttatgaaatggaattgttaacctctgacttattgtatttaaagaatgtttcatagtatttcttatataaaaacaaagtaatttcttgttttctagtttatcacctttgttttcttaagatgaggatggcttagctaatgtaagatgtgtttttctcacttgctattctgagtactgtgattttcatttacttctagcaatacaggattacaattaagaggacaagatctgaaaatctcacaaactataaaataataaaagagcagaattttaagataaaagaaactggtggtaggtagattgttctttggtgaaggaaggtaatatatattgttactgagattactatttataaaaattataactaagcctaaaagcaaaatacatcaagtgtaatgatagaaaatgaaatattgcttttttcagatgaaaagttcaaattagagttagtgtgtattgttattattaatagttatgaaacacggttcagtctaatttatttatttgtagaacagtttgtcctcaactattatttttgctgacttattgctgttaatttgcagttactaaaaatacagaaatgcatttaggacaatggatatttaagaaatttaaattttatcatcaaacgtatcatggccaaatttcttacatatagcatagtatcattaaactagaaataagaatacacaataatatttaaatgaagtgattcatttcggatcattattgagtttcaagggaacttgagtgttgtacttatcagactctacatgtaagaacatatagttaatctggttgtgtgtgtaaaaacatatggttaatctggttaagtctggttaatcatattaggtaagaaaaatgtaaagaatgtgtaagacgaaatttttgtaaagtactctgcaaagcactttcacatttctgcttatcaactaaacctcacagagatagtttaatagtttaggctttaaaatggattttgattattcaacaagtggccttcataatttctttaagtgtttttctttaagtatatactttctttaaatattttttaaaatttccttttctctagtaaagccagaccatccatgctacctctctagtggcactctgaaataaaaagaaaatagttttctctgttataattgtatttgtaataagcagatgaatcacatttcttaaaatttgttttagagagggtaagctctgactaggaccatgacttcaatgtgaaatatgtatatatcctccgaatctttacatattaagaatgtatatagtcaactggttaaacaggaaaatctggaacagcctggctgggttttaatcttagcaccatcctactaaatgttaaataatattataatctaatgaataaatgacaatgcaattccaaatagagttcatctgatgacttctagactcacaaaattgcaagagagctcagttgttgctcagttgttccaaatcatgtcgtttgttaatttgtaattaagctccaaaggatgtatagctactgacaaaaaaaaaaatgagaatgtagttaatccaaatcaaaactttcctattgcaatgcgtattttctgcttcattatcctttaatataatattttaagttagcaagtaattttaattacaatgcacaagccttgagaattattttaaatataagaaaatcataatgtttgataaagaaatcatgtaagaaatttcaagataatggtttaacaaataattttgttgatagaagataagactaaaagtgaaattcgaagtggagaggacacttaaactgtagtacttgttatgtgtgattccagtaaaaatagtaatgagcacttattattgccaagtactgttctgagggtaccatatgcaataagttatttaatccttacaataatcttgtaaggcagattcaaactatcattacacttattttacagatgagaaaactggggcacagataaagcaacttgcccaaggtctcatagctgtaagtcaaccctacggtcaagacctacaagtagccgagctccagagtacattatgagggtcaaagattgtcttattacaaataaattccaagtagaatcaacctttaataagtctttaatgtctcttaaatatgtttatataggagtctaatcaccaattcacaaaaatgaaagtagggaaatgattaacaataatcataggaatctaacaatccaagtggcttgagaatattcattcttcttgacagtatagattctttacaatttcgtaagttccaatgtatgttttaggaatatgaggtcattactattcataatctgatacagctttatcctaaggcctctctttaaaaactacactgcatcatagcttttttgtgcagttggtctttctactgttactgaacagtaagcaacctacagattcactatcaccaaccagccagttgatggatcttaagcaaattatcaagcttgtgataacctaaattataaaatgagggtgttggaatagttacattccaaatcttctataacactctgtattatatttctgcctcattccttgtagggtttcttcagtgcccgtggtcatcgaccccttgacaagaagagagaagaggctcccagcctgaggcctgccccaccgcccatcagtggaggtggctatcgggctcgtccagccaaagcagctgccactcaaaagaaagtagaaagaaaagcccctgatgctggaggctgtcttcacgctgacccagacctggtgggtgcactgatgtttcttgcagtggtggctctctcatgcagagaaagcctgtagtcatggcagtctgctaatgtttcactgacccacattaccatcactgttattttgtttgtttattttggaaataaaattcaaaacataaacatattgggcctttggtttaggctttctttcttgttttctttggtctgggcccaaaatttcaaattaggatatgtgggtgccacctttccatttgtattttgccactgcctttgtttagttggtaaaattttcatagcccaattatattttttctggggtaagtaatattttaaatctctatgagagtatgatgatgactttcgaatttctggtcttacagaaaaccaaataataaatttttatgttggctaatcgtatcgctgaattttcctatgtgctattttaacaaatgtccatgacccaaatccttcatctaatgcctgctattttctttgtttttagggggtgttgtgtcctacaggatgtcagttgcaagaggctttgctacaacaggaaaggccaatcagaaatagtgttgatgagttaaataacaatgtggaagctgtttcccagacctcctcttcttcctttcagtacatgtatttgctgaaagacctgtggcaaaagaggcagaagcaagtaaaaggtagatatccttgtgctttccattcgattttcagctataaaattggaaccgttagactgccacgagaatgcatggttgtgagaagattaacatttctgggttagtgaatagcattcatacgcttttgggcaccttcccctgcaacttgccagataagcactattcagctcttattcccagtctgacatcagcaagtgtgattttctatgaaaaattctactatgactccttattttaagtatacaagaaacttgtgactcagaagataatatttacagagtggaaaaaaacccctagcatttatagttttaacatttgaggttttgaatgagagagttatccataatatattcaattgtgttgtggataatgacacctaacctgtgaatcttgaggtcagaatgttgagtgctgttgacttggtggtcaggaaacagctagtgcgtgagcctggcacaggcatctcagtgagtagcatacccacagttggaaatttttcaaagaaatcaaaggaatcatgacatcttataaatttcaaggttctgctatacttatgtgaaatggataaataaatcaagcatatccactctgtaagattgaacttctcagatggaagaccccaatactgctttctcctcttttccctcaccaaagaaataaacaacctatttcatttattactggacacaatctttagcgtatacctatggtaaattactagtatggtggttaggatttatgttaatttgtatatgtcatgcgccaaatcatttccactaaatatgactatatatcataactgcttggtgatagctcagtgtttaatagtttattctcagaaaatcaaaattgtatagttaaatacattagttttatgaggcaaaaatgctaactatttctacataatttcatttttccagataatgaaaatgtagtcaatgagtactcctcagaactggaaaagcaccaattatatatagatgagactgtgaatagcaatatcccaactaaccttcgtgtgcttcgttcaatcctggaaaacctgagaagcaaaatacaaaagttagaatctgatgtctcagctcaaatggaatattgtcgcaccccatgcactgtcagttgcaatattcctgtggtgtctggcaaaggtaactgattcataaacatatttttagagagttccagaagaactcacacaccaaaaataagagaacaacaacaacaacaaaaatgctaagtggattttcccaacagatcataatgacattacagtacatcataaaaatatccttagccagttgtgttttggactggcctggtgcatttgctggttttgatgagcaggatggggcacaggtagtcccaggggtggctgatgtgtgcatctgcgtactggcttgaacagatggcagaaccacagatagatgtagaagtttctccattttgtgtgttctgggagctcatggatattccaggacacaaaaggtggagaagagctttgttcatcctcttagcagataaacgtcctcaaaactgggttggacttactaaagtaaaatgaaaatctaatatttgttatattattttcaaaggtctataataacacactccttagtaacttatgtaatgttattttaaagaattggtgactaaatacaaagtaattatgtcataaacccctgaacataatgttgtcttacatttgcagaatgtgaggaaattatcaggaaaggaggtgaaacatctgaaatgtatctcattcaacctgacagttctgtcaaaccgtatagagtatactgtgacatgaatacagaaaatggaggtaagctttcgacagttgttgacctgttgatctgtaattatttggataccgtaaaatgccaggaaacaaggccaggtgtggtggctcatacctgtaattccagcaccttgggaggccaaagtgggctgatagcttgagcctaggagtttgaaactagcctgggcaacataatgagaccctaactctacaaaaaaaaaaaaaataccaaaaaaaaaaaaaaaatcagctgtgttggtagtatgtgcctgtagtcccagctatccaggaggctgagatgggagatcacctgagcccacaacctggagtcttgatcatgctactgaactgtagcctgggcaacagaggatagtgagatcctgtctcaaaaaaaaaaattaattaaaaagccaggaaacaagacttagctctaacatctaacatagctgacaaaggagtaatttgatgtggaattcaacctgatatttaaaagttataaaatatctataattcacaatttggggtaagataaagcacttgcagtttccaaagattttacaagtttacctctcatatttatttccttattgtgtctattttagagcaccaaatatatactaaatggaatggacaggggattcagatattattttcaaagtgacattatttgctgttggttaatatatgctctttttgtttctgtcaaccaaaggatggacagtgattcagaaccgtcaagacggtagtgttgactttggcaggaaatgggatccatataaacagggatttggaaatgttgcaaccaacacagatgggaagaattactgtggcctaccaggtaacgaacaggcatgcaaaataaaatcattctatttgaaatgggattttttttaattaaaaaacattcattgttggaagcctgttttaggcagttaagaggagtttcctgacaaaaatgtggaagctaaagataagggaagaaaggcagtttttagtttcccaaaattttatttttggtgagagattttattttgtttttcttttaggtgaatattggcttggaaatgataaaattagccagcttaccaggatgggacccacagaacttttgatagaaatggaggactggaaaggagacaaagtaaaggctcactatggaggattcactgtacagaatgaagccaacaaataccagatctcagtgaacaaatacagaggaacagccggtaatgccctcatggatggagcatctcagctgatgggagaaaacaggaccatgaccattcacaacggcatgttcttcagcacgtatgacagagacaatgacggctggtatgtgtggcactctttgctcctgctttaaaaatcacactaatatcattactcagaatcattaacaatatttttaatagctaccacttcctgggcacttactgtcagccactgtcctaagctctttatgcatcactcgaaagcatttcaactataaggtagacattcttattctcattttacagatgagatttagagagattacgtgatttgtccaatgtcacacaactacccagagataaaactagaatttgagcacagttactttctgaataatgagcatttagataaatacctatatctctatattctaaagtgtgtgtgaaaactttcattttcatttccagggttctctgatactaagggttgtaaaagctattattccagtataaagtaacaaacacagtccctagatggattgccacaaaggcccagttatctctctttcttgctatagggcacaggaggtctttggtgtattagtgtgactctatgtatagcacccaaaggaaagactactgtgcacacgagtgtagcagtcttttatgggtaatctgcaaaacgtaacttgaccaccgtagttctgtttctaataacgccaaacacattttctttcaggttaacatcagatcccagaaaacagtgttctaaagaagacggtggtggatggtggtataatagatgtcatgcagccaatccaaacggcagatactactggggtggacagtacacctgggacatggcaaagcatggcacagatgatggtgtagtatggatgaattggaaggggtcatggtactcaatgaggaagatgagtatgaagatcaggcccttcttcccacagcaatagtccccaatacgtagatttttgctcttctgtatgtgacaacatttttgtacattatgttattggaattttctttcatacattatattcctctaaaactctcaagcagacgtgagtgtgactttttgaaaaaagtataggataaattacattaaaatagcacatgattttcttttgttttcttcatttctcttgctcacccaagaagtaacaaaagtatagttttgacagagttggtgttcataatttcagttctagttgattgcgagaattttcaaataaggaagaggggtcttttatccttgtcgtaggaaaaccatgacggaaaggaaaaactgatgtttaaaagtccacttttaaaactatatttatttatgtaggatctgtcaaagaaaacttccaaaaagatttattaattaaaccagactctgttgcaataagttaatgttttcttgttttgtaatccacacattcaatgagttaggctttgcacttgtaaggaaggagaagcgttcacaacctcaaatagctaataaaccggtcttgaatatttgaagatttaaaatctgactctaggacgggcacggtggctcacgactataatcccaacactttgggaggctgaggcgggcggtcacaaggtcaggagttcaagaccagcctgaccaatatggtgaaaccccatctctactaaaaatacaaaaattagccaggcgtggtggcaggtgcctgtaggtcccagctagcctgtgaggtggagattgcattgagccaagatc

SEQ ID NO: 1020 - DNA, 1976 bp, Homo sapiens
gcagaggaggagcgcacgccggcctcgaagaacttctgcttgggtggctgaactctgatcttgacctagagtcatggccatggcaaccaaaggaggtactgtcaaagctgcttcaggattcaatgccatggaagatgcccagaccctgaggaaggccatgaaagggctcggcaccgatgaagacgccattattagcgtccttgcctaccgcaacaccgcccagcgccaggagatcaggacagcctacaagagcaccatcggcagggacttgatagacgacctgaagtcagaactgagtggcaacttcgagcaggtgattgtggggatgatgacgcccacggtgctgtatgacgtgcaagagctgcgaagggccatgaagggagccggcactgatgagggctgcctaattgagatcctggcctcccggacccctgaggagatccggcgcataagccaaacctaccagcagcaatatggacggagccttgaagatgacattcgctctgacacatcgttcatgttccagcgagtgctggtgtctctgtcagctggtgggagggatgaaggaaattatctggacgatgctctcgtgagacaggatgcccaggacctgtatgaggctggagagaagaaatgggggacagatgaggtgaaatttctaactgttctctgttcccggaaccgaaatcacctgttgcatgtgtttgatgaatacaaaaggatatcacagaaggatattgaacagagtattaaatctgaaacatctggtagctttgaagatgctctgctggctatagtaaagtgcatgaggaacaaatctgcatattttgctgaaaagctctataaatcgatgaagggcttgggcaccgatgataacaccctcatcagagtgatggtttctcgagcagaaattgacatgttggatatccgggcacacttcaagagactctatggaaagtctctgtactcgttcatcaagggtgacacatctggagactacaggaaagtactgcttgttctctgtggaggagatgattaaaataaaaatcccagaaggacaggaggattctcaacactttgaatttttttaacttcatttttctacactgctattatcattatctcagaatgcttatttccaattaaaacgcctacagctgcctcctagaatatagactgtctgtattattattcacctataattagtcattatgatgctttaaagctgtacttgcatttcaaagcttataagatataaatggagattttaaagtagaaataaatatgtattccatgtttttaaaagattactttctactttgtgtttcacagacattgaatatattaaattattccatattttcttttcagtgaaaaattttttaaatggaagactgttctaaaatcacttttttccctaatccaatttttagagtggctagtagtttcttcatttgaaattgtaagcatccggtcagtaagaatgcccatccagttttctatatttcatagtcaaagccttgaaagcatctacaaatctctttttttaggttttgtccatagcatcagttgatccttactaagtttttcatgggagacttccttcatcacatcttatgttgaaatcactttctgtagtcaaagtataccaaaaccaatttatctgaactaaattctaaagtatggttatacaaaccatatacatctggttaccaaacataaatgctgaacattccatattattatagttaatgtcttaatccagcttgcaagtgaatggaaaaaaaaataagcttcaaactaggtattctgggaatgatgtaatgctctgaatttagtatgatataaagaaaacttttttgtgctaaaaatactttttaaaatcaattttgttgattgtagtaatttctatttgcactgtgcctttcaactccagaaacattctaagatgtacttggatttaattaaaaagttca

SEQ ID NO: 1021 - DNA, 712 bp, Homo sapiens
ttctttctttgctgcgtctacctgcgagaatgaagactattctcagcaatcagactgtcgagattccagaaaatgtcgacattactctgaagggacgcacagttatcgtgaagggccccagaggaaccctgcggagggacttcaatcacatcaatgtagaactcagccttcttggaaagaaaaaaaagaggctccgggttgacaaatggtggggtaacagaaaggaactggctaccgttcggactatttgtagtcatgtacagaacatgatcaagggtgttacactgggcttccgttacaagatgaggtctgtgtatgctcacttccccatcaacgttgttatccaggagaatgggtctcttgttgaaatccgaaatttcttgggtgaaaaatacatccgcagggttcggatgagaccaggtgttgcttgttcagtatctcaagcccagaaagatgaattaatccttgaaggaaatgacattgagcttgtttcaaattcagcggctttgattcagcaagccacaacagttaaaaacaaggatatcaggaaatttttggatggtatctatgtctctgaaaaaggaactgttcagcaggctgatgaataagatctaagagttacctggctacagaaagaagatgccagatgacacttaagacctacttgtgatatttaaatgatgcaataaaagacctattgatttggaccttc

SEQ ID NO: 1022 - DNA, 752 bp, Homo sapiens
tctcagttatcaatttcctgtctacgcgtgattacaactcgtggtctcccgtccgttccctcgttcccagagcacgaagaagcttgcctccgcaacccactatttgtgtgaccttggtccaggaactggactgggctctcctcctgaaagtgggtaaataatgtcaccgacctaatgaggctgttgaggcatggaatctgatcaggcagataaagtcccctggcaaacctcaattttctgtttctcaacaaagcttcgaagctttggcgacttataaggatttgcgggaaagtgtccagaacccggagtcgacttctagccctgaagggcgcgtgaccttggccaaagccctaatccttctcagcctcagatccgggggctggaaactgaggaggttctcccggcaacccctcgggctagtgacattctaagattccaagagctaaggagctagtggggtggggtggaggagggaggcgggggccggattgattggcctctgcgcgccacgtgtccggctcggagcccacggctgtcctcccggtccgcgccgctgcggttgctgctgggctaacgggctccgatccagcgagcgctgcgtcctcgagtccgcccgtgcgtccgtctgcgacccgaggcctccgctgcgcggtgagtgggctgaggctggagaggggagtcgctctgggaaccccttcccgggggctgcagggacacaagaaataagcgcccagtcatcggctgatggtacc

SEQ ID NO: 1023 - DNA, 247 bp, Homo sapiens
tttctttcagcaatacctgaacaccttctatggctgccccaaggagagctgcaacctgtttgtgctgaaggacacactaaagaagatgcagaagttctttggactgccccagacaggtgatcttgaccagaataccatcgagaccatgcggaagccacgctgcggcaacccagatgtggccaactacaacttcttccctcgcaagcccaagtgggacaagaaccagatcacatacaggtgccggggc

SEQ ID NO: 1024 - DNA, 169 bp, Homo sapiens
ccacctccaggatcattggctacacacctgatctggacccagagacagtggatgatgcctttgctcgtgccttccaagtctggagcgatgtgaccccactgcggttttctcgaatccatgatggagaggcagacatcatgatcaactttggccgctggggtaggcagaa

SEQ ID NO: 1025 - DNA, 149 bp, Homo sapiens
gtgtgttcagagcatggcgatggatacccctttgacggtaaggacggactcctggctcatgccttcgccccaggcactggtgttgggggagactcccattttgatgacgatgagctatggaccttgggagaaggccaaggtgagaaagg

SEQ ID NO: 1026 - DNA, 194 bp, Homo sapiens
cactctttagtggtccgtgtgaagtatggcaacgccgatggggagtactgcaagttccccttcttgttcaatggcaaggagtacaacagctgcactgatactggccgcagcgatggcttcctctggtgctccaccacctacaactttgagaaggatggcaagtacggcttctgtccccatgaaggtgagcatcc

SEQ ID NO: 1027 - DNA, 194 bp, Homo sapiens
ccacccttagccctgttcaccatgggcggcaacgctgaaggacagccctgcaagtttccattccgcttccagggcacatcctatgacagctgcaccactgagggccgcacggatggctaccgctggtgcggcaccactgaggactacgaccgcgacaagaagtatggcttctgccctgagaccggtgggtgcca

SEQ ID NO: 1028 - DNA, 194 bp, Homo sapiens
taacccacagccatgtccactgttggtgggaactcagaaggtgccccctgtgtcttccccttcactttcctgggcaacaaatatgagagctgcaccagcgccggccgcagtgacggaaagatgtggtgtgcgaccacagccaactacgatgacgaccgcaagtggggcttctgccctgaccaaggtacgaggcc

SEQ ID NO: 1029 - DNA, 176 bp, Homo sapiens
aaaccctcagggtacagcctgttcctcgtggcagcccacgagtttggccacgccatggggctggagcactcccaagaccctggggccctgatggcacccatttacacctacaccaagaacttccgtctgtcccaggatgacatcaagggcattcaggagctctatggtaaacctcc

SEQ ID NO: 1030 - DNA, 156 bp, Homo sapiens
ttctccccaggggcctctcctgacattgaccttggcaccggccccacccccacactgggccctgtcactcctgagatctgcaaacaggacattgtatttgatggcatcgctcagatccgtggtgagatcttcttcttcaaggaccggtgagtgcag

SEQ ID NO: 1031 - DNA, 157 bp, Homo sapiens
ctcctgccaggttcatttggcggactgtgacgccacgtgacaagcccatggggcccctgctggtggccacattctggcctgagctcccggaaaagattgatgcggtatacgaggccccacaggaggagaaggctgtgttctttgcaggtgtgtggga

SEQ ID NO: 1032 - DNA, 180 bp, Homo sapiens
tccaccccagggaatgaatactggatctactcagccagcaccctggagcgagggtaccccaagccactgaccagcctgggactgccccctgatgtccagcgagtggatgccgcctttaactggagcaaaaacaagaagacatacatctttgctggagacaaattctggaggtaagggagg

SEQ ID NO: 1033 - DNA, 130 bp, Homo sapiens
ttctttacagatacaatgaggtgaagaagaaaatggatcctggctttcccaagctcatcgcagatgcctggaatgccatccccgataacctggatgccgtcgtggacctgcagggcggcggtgagcaccc

SEQ ID NO: 1034 - DNA, 911 bp, Homo sapiens
tctatcccaggtcacagctacttcttcaagggtgcctattacctgaagctggagaaccaaagtctgaagagcgtgaagtttggaagcatcaaatccgactggctaggctgctgagctggccctggctcccacaggcccttcctctccactgccttcgatacaccgggcctggagaactagagaaggacccggaggggcctggcagccgtgccttcagctctacagctaatcagcattctcactcctacctggtaatttaagattccagagagtggctcctcccggtgcccaagaatagatgctgactgtactcctcccaggcgccccttccccctccaatcccaccaaccctcagagccacccctaaagagatcctttgatattttcaacgcagccctgctttgggctgccctggtgctgccacacttcaggctcttctcctttcacaaccttctgtggctcacagaacccttggagccaatggagactgtctcaagagggcactggtggcccgacagcctggcacagggcagtgggacagggcatggccaggtggccactccagacccctggcttttcactgctggctgccttagaacctttcttacattagcagtttgctttgtatgcactttgtttttttctttgggtcttgttttttttttccacttagaaattgcatttcctgacagaaggactcaggttgtctgaagtcactgcacagtgcatctcagcccacatagtgatggttcccctgttcactctacttagcatgtccctaccgagtctcttctccactggatggaggaaaaccaagccgtggcttcccgctcagccctccctgcccctcccttcaaccattccccatgggaaatgtcaacaagtatgaataaagacacctactgagtggc

SEQ ID NO: 1035 - DNA, 2275 bp, Homo sapiens; identical to SEQ ID NO: 984

SEQ ID NO: 1036 - DNA, 5460 bp, Homo sapiens; identical to SEQ ID NO: 985

SEQ ID NO: 1037 - DNA, 1457 bp, Homo sapiens
tccgttgctgtcggcgcgcggcggcccgggcgggggaagctggcgggctgaggcgccccgctcttctcctctgccccgggcccgcgaggccacgcgtcgccgcacgagagatgatgcaggacgtgtccagctcgccagtctcgccggccgacgacagcctgagcaacagcgaggaagagccagaccggcagcagccgccgagcgcgaagcgcggggcacgcaagcggcgcagcagcaggcgcagcgcgggcggcggcgcggggcccggcggagccgcgggtggggccgtcggaggcggcgacgagccgggcagcccggcccagggcaagcgcggcaagaagtctgcgggctgtggcggcggcggcggcgcgggcggcggcggcggcggcggcggcggcagcagcagcggcggcgggagtccgcagtcttacgaggagctgcagacgcagcgggtcatggccaacgtgcgggagcgccagcgcacccagtcgctgaacgaggcgttcgccgcgctgcggaagatcatccccacgctgccctcggacaagctgagcaagattcagaccctcaagctggcggccaggtacatcgacttcctctaccaggtcctccagagcgacgagctggactccaagatggcaagctgcagctatgtggctcacgagcggctcagctacgccttctcggtctggaggatggagggggcctggtccatgtccgcgtcccactagcagcggagccccccaccccctcagcagggccggagacctagatgtcattgtttccagagaaggagaaaatggacagtctagagactctggagctggataactaaaaataaaaatatatgccaaagattttcttggaaattagaagagcaaaatccaaattcaaagaaacagggcgtggggcgcacttttaaaagagaaagcgagacaggcccgtggacagtgattcccagacgggcagcgcaccatcctcacatcctctgcattctgatagaagtctgaacagttgtttgtgtttttttttttttttttttgacgaagaatgtttttatttttatttttttcatgcatgcattctcaagaggtcgtgccaatcatcagccactgaaaggaaaggcatcactatggactttctctattttaaaatggtaacaatcagaggaactataagaacacctttagaaataaaaatactgggatcaaactggcctgcaaaaccatagtcagttaattctttttttcatccttcctctgaggggaaaaacaaaaaaaaacttaaaatacaaaaaataacattctatttatttattgaggacccatggtaaatgcaatagtccggtgtctaaatgcattcatatttttatgattgttttgtaaatatctttgtatatttttctgcaataaataaatataaaaaatttagagaaaaaaaaaaaaaaaaaaaaaaaa

SEQ ID NO: 1038 - DNA, 6158 bp, Homo sapiens
  misc_feature 2434, 2435, 2586: n = A,T,C or G
aaccatcaaatttagaagaaaaagccctttgactttttccccctctccctccccaatggctgtgtagcaaacatccctggcgataccttggaaaggacgaagttggtctgcagtcgcaatttcgtgggttgagttcacagttgtgagtgcggggctcggagatggagccgtggtcctctaggtggaaaacgaaacggtggctctgggatttcaccgtaacaaccctcgcattgaccttcctcttccaagctagagaggtcagaggagctgctccagttgatgtactaaaagcactagattttcacaattctccagagggaatatcaaaaacaacgggattttgcacaaacagaaagaattctaaaggctcagatactgcttacagagtttcaaagcaagcacaactcagtgccccaacaaaacagttatttccaggtggaactttcccagaagacttttcaatactatttacagtaaaaccaaaaaaaggaattcagtctttccttttatctatatataatgagcatggtattcagcaaattggtgttgaggttgggagatcacctgtttttctgtttgaagaccacactggaaaacctgccccagaagactatcccctcttcagaactgttaacatcgctgacgggaagtggcatcgggtagcaatcagcgtggagaagaaaactgtgacaatgattgttgattgtaagaagaaaaccacgaaaccacttgatagaagtgagagagcaattgttgataccaatggaatcacggtttttggaacaaggattttggatgaagaagtttttgagggggacattcagcagtttttgatcacaggtgatcccaaggcagcatatgactactgtgagcattatagtccagactgtgactcttcagcacccaaggctgctcaagctcaggaacctcagatagatgagtatgcaccagaggatataatcgaatatgactatgagtatggggaagcagagtataaagaggctgaaagtgtaacagagggacccactgtaactgaggagacaatagcacagacggaggcaaacatcgttgatgattttcaagaatacaactatggaacaatggaaagttaccagacagaagctcctaggcatgtttctgggacaaatgagccaaatccagttgaagaaatatttactgaagaatatctaacgggagaggattatgattcccagaggaaaaattctgaggatacactatatgaaaacaaagaaatagacggcagggattctgatcttctggtagatggagatttaggcgaatatgatttttatgaatataaagaatatgaagataaaccaacaagcccccctaatgaagaatttggtccaggtgtaccagcagaaactgatattacagaaacaagcataaatggccatggtgcatatggagagaaaggacagaaaggagaaccagcagtggttgagcctggtatgcttgtcgaaggaccaccaggaccagcaggacctgcaggtattatgggtcctccaggtctacaaggccccactggaccccctggtgaccctggcgataggggccccccaggacgtcctggcttaccaggggctgatggtctacctggtcctcctggtactatgttgatgttaccgttccgttatggtggtgatggttccaaaggaccaaccatctctgctcaggaagctcaggctcaagctattcttcagcaggctcggattgctctgagaggcccacctggcccaatgggtctaactggaagaccaggtcctgtgggggggcctggttcatctggggccaaaggtgagagtggtgatccaggtcctcagggccctcgaggcgtccagggtccccctggtccaacgggaaaacctggaaaaaggggtcgtccaggtgcagatggaggaagaggaatgccaggagaacctggggcaaagggagatcgagggtttgatggacttccgggtctgccaggtgacaaaggtcacaggggtgaacgaggtcctcaaggtcctccaggtcctcctggtgatgatggaatgaggggagaagatggagaaattggaccaagaggtcttccaggtgaagctggcccacgaggtttgctgggtccaaggggaactccaggagctccagggcagcctggtatggcaggtgtagatggccccccaggaccaaaagggaacatgggtccccaaggggagcctgggcctccaggtcaacaagggaatccaggacctcagggtcttcctggtccacaaggtccaattggtcctcctggtgaaaaaggaccacaaggaaaaccaggacttgctggacttcctggtgctgatgggcctcctggtcatcctgggaaagaaggccagtctggagaaaagggggctctgggtccccctggtccacaaggtcctattggatnnccgggcccccggggagtaaagggagcagatggtgtcagaggtctcaagggatctaaaggtgaaaagggtgaagatggttttccaggattcaaaggtgacatgggtctaaaaggtgacagaggagaagttggtcaaattggcccaagagggnaagatggccctgaaggacccaaaggtcgagcaggcccaactggagacccaggtccttcaggtcaagcaggagaaaagggaaaacttggagttccaggattaccaggatatccaggaagacaaggtccaaagggttccactggattccctgggtttccaggtgccaatggagagaaaggtgcacggggagtagctggcaaaccaggccctcggggtcagcgtggtccaacgggtcctcgaggttcaagaggtgcaagaggtcccactgggaaacctgggccaaagggcacttcaggtggcgatggccctcctggccctccaggtgaaagaggtcctcaaggacctcagggtccagttggattccctggaccaaaaggccctcctggaccaccaggaaggatgggctgcccaggacaccctgggcaacgtggggagactggatttcaaggcaagaccggccctcctgggccagggggagtggttggaccacagggaccaaccggtgagactggtccaataggggaacgtgggtatcctggtcctcctggccctcctggtgagcaaggtcttcctggtgctgcaggaaaagaaggtgcaaagggtgatccaggtcctcaaggtatctcagggaaagatggaccagcaggattacgtggtttcccaggggaaagaggtcttcctggagctcagggtgcacctggactgaaaggaggggaaggtccccagggcccaccaggtccagttggctcaccaggagaacgtgggtcagcaggtacagctggcccaattggtttacgagggcgcccgggacctcagggtcctcctggtccagctggagagaaaggtgctcctggagaaaaaggtccccaagggcctgcagggagagatggagttcaaggtcctgttggtctcccagggccagctggtcctgccggctcccctggggaagacggagacaagggtgaaattggtgagccgggacaaaaaggcagcaagggtggcaagggagaaaatggccctcccggtcccccaggtcttcaaggaccagttggtgcccctggaattgctggaggtgatggtgaaccaggtcctagaggacagcaggggatgtttgggcaaaaaggtgatgagggtgccagaggcttccctggacctcctggtccaataggtcttcagggtctgccaggcccacctggtgaaaaaggtgaaaatggggatgttggtccatgggggccacctggtcctccaggcccaagaggccctcaaggtcccaatggagctgatggaccacaaggacccccaggttctgttggttcagttggtggtgttggagaaaagggtgaacctggagaagcaggaaacccagggcctcctggggaagcaggtgtaggcggtcccaaaggagaaagaggagagaaaggggaagctggtccacctggagctgctggacctccaggtgccaaggggccgccaggtgatgatggccctaagggtaacccgggtcctgttggttttcctggagatcctggtcctcctggggaacttggccctgcaggtcaagatggtgttggtggtgacaagggtgaagatggagatcctggtcaaccgggtcctcctggcccatctggtgaggctggcccaccaggtcctcctggaaaacgaggtcctcctggagctgcaggtgcagagggaagacaaggtgaaaaaggtgctaagggggaagcaggtgcagaaggtcctcctggaaaaaccggcccagtcggtcctcagggacctgcaggaaagcctggtccagaaggtcttcggggcatccctggtcctgtgggagaacaaggtctccctggagctgcaggccaagatggaccacctggtcctatgggacctcctggcttacctggtctcaaaggtgaccctggctccaagggtgaaaagggacatcctggtttaattggcctgattggtcctccaggagaacaaggggaaaaaggtgaccgagggctccctggaactcaaggatctccaggagcaaaaggggatgggggaattcctggtcctgctggtcccttaggtccacctggtcctccaggcttaccaggtcctcaaggcccaaagggtaacaaaggctctactggacccgctggccagaaaggtgacagtggtcttccagggcctcctgggcctccaggtccacctggtgaagtcattcagcctttaccaatcttgtcctccaaaaaaacgagaagacatactgaaggcatgcaagcagatgcagatgataatattcttgattactcggatggaatggaagaaatatttggttccctcaattccctgaaacaagacatcgagcatatgaaatttccaatgggtactcagaccaatccagcccgaacttgtaaagacctgcaactcagccatcctgacttcccagatggtgaatattggattgatcctaaccaaggttgctcaggagattccttcaaagtttactgtaatttcacatctggtggtgagacttgcatttatccagacaaaaaatctgagggagtaagaatttcatcatggccaaaggagaaaccaggaagttggtttagtgaatttaagaggggaaaactgctttcatacttagatgttgaaggaaattccatcaatatggtgcaaatgacattcctgaaacttctgactgcctctgctcggcaaaatttcacctaccactgtcatcagtcagcagcctggtatgatgtgtcatcaggaagttatgacaaagcacttcgcttcctgggatcaaatgatgaggagatgtcctatgacaataatccttttatcaaaacactgtatgatggttgtacgtccagaaaaggctatgaaaaaactgtcattgaaatcaatacaccaaaaattgatcaagtacctattgttgatgtcatgatcagtgactttggtgatcagaatcagaagttcggatttgaagttggtcctgtttgttttcttggctaagattaagacaaagaacatatcaaatcaacagaaaatgtaccttggtgccaccaacccattttgtgccacatgcaagttttgaataaggatgtatggaaaacaacgctgcatatacaggtaccatttaggaaataccgatgcctttgtgggggcagaatcacagacaaaagctttgaaaatcataaagatataagttggtgtggctaagatggaaacagggctgattcttgattcccaattctcaactctccttttcctatttgaatttctttggtgctgtagaaaacaaaaaaagaaaaatatatattcataaaaaatatggtgctcattctcatccatccaggatgtactaaaacagtgtgtttaataaattgtaattattttgtgtacagttctatactgttatctgtgtccatttccaaaacttgcacgtgtccctgaattccgctgactctaatttatgaggatgccgaactctgatggcaataatatatgtattatgaaaatgaagttatgatttccgatgaccctaagtccctttctttggttaatgatgaaattcctttgtgtgtgttt

SEQ ID NO: 1039 - DNA, 1775 bp, Homo sapiens
ctgcaggtcaacggatcatgaggcatattttgatgactaatagaaaactgagttcctaaagattagtggcagctgtagaattgaacatatgtacccagtaaacttagttgagggcctttaagcatttaaatgacttaaatactcaaagtaggccctggccaatgcttctagtctttgtcaacagaaaaatgtgttcattcatccaacccatctctattgagtggctaatgtatgctggcaccctgatgggcactgttccagaaaatctttgagagaaacatcttaggaattattaacgaacaaaaaggagtcaacagaatggaatgattttaacgtggaaaaagtgacttgggaatctatattccaggtgtaagaggattactttgaggatgggttaagtagagagggaatttagaaacctgccctcttcattactctcactgtggagtgaccacgtttttggctcccgaggctgagggccagggccaggcccttaatgaggagctgtgggccgaggctcttggagatttctgctagttgctttcctcgccttttctacacactcctcagtaccccctcatccaggatcagaacagaatcagctggaaaattaaattactcaccctcttaatgtcagctcccataaattttttcctccttctccctcagagtacagttcaactcttttaagaggaaagccactgaatgaacctagtgctgaatttaaacgtttaagagataaacctgtcagtttcagatctccaaagaggacttccctacatgctctaggttttgacttctagggtccctccattctatcttcattcctttcttctaattattgggttaaaaaaataaaaataaaaacacttttcagagtaggcagccgaatgagtccactggttccacgtctgccatacgaagcagatttttgcacaaggataaggttaccgctgccagcccaggactccagcggtgtggccgatcaggcgctggcctcctcccctctcccgccgaccagcgagaggctaacagacgggtgcaagtagacaagtagctgtttttattgaatacagaagctccttgaaaactccgtgtgctccggggctctcctgcaattcctttcattcccaaagtgctggagccaagcacgcgtcccccgtaactccctcccattttttctcggggatttggtaggcgaggagggaggagaggagtggggagatggggggtggttggtgggctgggcctgctcggagtcctcattcttgggctgagggaggcgggggcgggcttggggccgccccagagtcgtgtgattgggtctgaccctcagcctgcttgtcagtttcgccctgggagggggagctgggagcagggaggggagtgggcggaggagggggctgcccggagccactcgtccagcccactgacggcatgaagcctttaggggcacacagtactctcagcttgttggtggaagcccctcatctgccttcattctgaaggcagggcccggcagaggaaggatcagagggtcgcggccggagggtcccggccggtggggccaactcagagggagaggaaagggctagagacacgaagaacgcaaaccatcaaatttagaagaaaaagccctttgactttttccccctctccctccccaatggctgtgtagcaaacatccctggcgataccttggaaaggacgaagttggtctgcagtcgcaatttcgtgggttgagttcacagttgtgagtgcggggctcggagatg

SEQ ID NO: 1040 - DNA, 1671 bp, Homo sapiens
agatcttggcaagtgtgagggtggcacaaaagttcatcgataattttccttaaaatgcatgttcaactggggctatcatattccctgcaaagctggcttaaagctaataataccaccatctgcttttatgtagctctttgcaatttggagcttcattaataatacattactcattttagtgtcactaaaccctgtacactggtcagggtaaagccctttcttttctcaaatgagaaaattggagtgcacagagataaaggactatatgcacatttacaaaattattgagtggcagaaccactcacaaaaggcagaagcaagccttttttcatccaaaggtagagtacttcccattcctctgcactgcttagtagactatttttcaacatggtaaaactctctgggacaagaggaacctgaagatgtggccccttaacaagagatgtggagaaattaggaaaggacatgctttcttaattcaaattacaatgtatcacaaattcatttatccaaaatggttttctaacctggactttacctgggcaacattctaataatctccttccagagtatgggaaaagaaaccgaatctgagaaggggataagaatactccctattcagtcaaaagaaagggttaaaatgtgattgtttaaagatttaaggtggagaagagagtcttgaattatctaaatgtaaaaaaactagggtaaaaggctggatttccttcggaatgtctttttcagcttataggggaaaagttaaagggtgtgtgtctggggggaagggttagggaggggaaaataaaacccttttcttctaacagcctttcttaaaaaataaaagaaaagagaaacaaatgtttgtttctgttattaagccccatctatgcttaaaagttaaatgaaatagggaaagttcaggcacagagacgcgtgttctgatttggttgtttaccatcaatcagaccgttgcttggcagacactggatggttatgagcctgaacaagctgaaaaggggcaggaaaagaagtggaggcagcattcttcctatttaaagctgcatcgcttgaaaaaagttttcgcagactgtgctggagctggtgctgaaaaagggggtttgcagaggctgccctggggctggtgctgaaagaagagcccacagctgacttcatggtgctacaataacctcagaatctacttttcactctcaggagaacccacatgtctaatatttagacatgatggcaaactgggcggaagcaagacctctcctcattcttattgttttattagggcaatttgtctcaataaaagcccaggaagaagacgaggatggtgagtttgccatttgctttgcttgtagtgtttattgcacggtttgggaaataggtggaatgttaagcctcaggaagagcgtgaagaggaggttctggtttgaagtttgagaagggggctgacggatttgcacctggaaaacgacttgaaagacaattgggatgtttgtaaatccggagcttctagatccaccgttggagagagtacactactaaatttttctgggaaagcctacaataagtccttttggctgagtgtgagagtgggacgtttaaaataagaaaagagtgaatgcttaaaacggagcactaaaggcattttagttagaggagctc

SEQ ID NO: 1041 - DNA, 4629 bp, Homo sapiens
gggggtgaaaaagggggtttgcagaggctgccctggggctggtgctgaaagaagagcccacagctgacttcatggtgctacaataacctcagaatctacttttcactctcaggagaacccacagtctaatatttagacatgatggcaaactgggcggaagcaagacctctcctcattcttattgttttattagggcaatttgtctcaataaaagcccaggaagaagacgaggatgaaggatatggtgaagaaatagcctgcactcagaatggccagatgtacttaaacagggacatttggaaacctgccccttgtcagatctgtgtctgtgacaatggagccattctctgtgacaagatagaatgccaggatgtgctggactgtgccgaccctgtaacgccccctggggaatgctgtcctgtctgttcacaaacacctggaggtggcaatacaaattttggtagaggaagaaagggacaaaagggagaaccaggattagtgcctgttgtaacaggcatacgtggtcgtccaggaccggcaggacctccaggatcacagggaccaagaggagagcgagggccaaaaggaagacctggccctcgtggacctcagggaattgatggagaaccaggtgttcctggtcaacctggtgctccaggacctcctggacatccgtcccacccaggacccgatggcttgagcaggccgttttcagctcaaatggctgggttggatgaaaaatctggacttgggagtcaagtaggactaatgcctggctctgtgggtcctgttggcccaaggggaccacagggtttacaaggacagcaaggtggtgcaggacctacaggacctcctggtgaacctggtgatcctggaccaatgggtccgattggttcacgtggaccagagggccctcctggtaaacctggggaagatggtgaacctggcagaaatggaaatcctggtgaagtgggatttgcaggatctccgggagctcgtggatttcctggggctcctggtcttccaggtctgaagggtcaccgaggacacaaaggtcttgaaggccctaaaggtgaagttggagcacctggttccaagggtgaagctggccccactggtccaatgggtgccatgggtcctctgggtccgaggggaatgccaggagagagagggagacttgggccacagggtgctcctggacaacgaggtgcacatggtatgcctggaaaacctggaccaatgggtcctcttgggataccaggctcttctggttttccaggaaatcctggaatgaagggagaagcaggtcctacaggggcgcgaggccctgaaggtcctcaggggcagagaggtgaaactgggcccccaggtccagttggctctccaggtcttcctggtgcaataggaactgatggtactcctggtcccaaaggcccaacgggctctccgggtacctctggtcctcctggctcagcagggcctcctggatctccaggacctcagggtagcactggtcctcaggggaattcgggccttccgggtgatccaggtttcaaaggagaagctggcccaaaaggggaaccagggccacatggtattcagggtccgataggcccacccggtgaagaaggcaaaagaggtcccagaggtgacccaggaacacttggtcctccagggccagtgggagaaaggggtgctcctggcaatcgtggttttccaggctctgatggtttacctgggccaaagggtgctcaaggagaacggggtcctgtaggttcttcaggacccaaaggaagccagggggatccaggacgtccaggggaacctgggcttccaggtgctcggggtttgacaggaaatcctggtgttcaaggtcctgaaggaaaacttggacctttgggtgcgccaggggaagatggccgtccaggtcctccaggctccataggaatcaaagggcagcccgggaccatgggccttccaggccccaaaggtagcaatggtgaccctgggaaacctggagaagcaggaaatcctggagttcctgggcaaaggggagctcctggaaaagatggtaaagttggtccttatggtcctcctgggccgccgggtctacgtggtgaaagaggagaacaaggacctccagggcccacaggttttcaggggcatcctggtcctccaggtcctcctggagaaggtggaaaaccaggtgatcaaggtgttcctggaggtcccggagcagttggcccgttaggacctagaggagaacgaggaaatcctggggaaagaggagaacctgggataactggactccctggtgagaagggaatggctggaggacatggtcctgatggcccaaaaggcagtccaggtccatctgggacccctggagatacaggcccaccaggtcttcaaggtatgccgggagaaagaggaattgcaggaactcctggccccaagggtgacagaggtggcataggagaaaaaggtgctgaaggcacagctggaaatgatggtgcaggaggtcttccaggtcctttgggccctccaggtccggcaggcctactgggagaaaagggtgaacctggtcctcgaggtttagttggtcctcctggctcccggggcaatcctggttctcgaggtgaaaatgggccaactggagctgttggttttgccggaccccaggggtctgacggacagcctggagtaaaaggtgaacctggagagccaggacagaagggagatgctggttctcctggaccacaaggtttagcaggatcccctggccctcatggtcctaatggtgttcctggactaaaaggtggtcgaggaacccaaggtccgcctggtgctacaggatttcctggttctgcgggcagagttggacctccaggccctgctggagctccaggacctgcgggacccctaggggaacccgggaaggagggacctccaggtcctcgtggggaccctggctctcatgggcgtgtgggagtccgaggaccagctggcccccctggtggcccaggagacaaaggggacccaggagaagatgggcaacctggtccagatggcccccctggtccagctggaacgaccgggcagagaggaattgttggcatgcctgggcaacgtggagagagaggcatgcccggcctaccaggcccagcgggaacaccaggaaaagtaggaccaactggtgcaacaggagataaaggtccacctggacctgtggggcccccaggctccaatggtcctgtaggggaacctggaccagaaggtccagctggcaatgatggtaccccaggacgggatggtgctgttggagaacgtggtgatcgtggagaccctgggcctgcaggtctgccaggctctcagggtgcccctggaactcctggccctgtgggtgctccaggagatgcaggacaaagaggagatccgggttctcggggtcctataggacacctgggtcgagctggaaaacgtggattacctggaccccaaggacctcgtggtgacaaaggtgatcatggagaccgaggcgacagaggtcagaagggccacagaggctttactggtcttcagggtcttcctggccctcctggtccaaatggtgaacaaggaagtgctggaatccctggaccatttggcccaagaggtcctccaggcccagttggtccttcaggtaaagaaggaaaccctgggccacttgggccattgggacctccaggtgtacgaggcagtgtaggagaagcaggacctgagggccctcctggtgagcctggcccacctggccctccgggtccccctggccaccttacagctgctcttggggatatcatggggcactatgatgaaagcatgccagatccacttcctgagtttactgaagatcaggcggctcctgatgacaaaaacaaaacggacccaggggttcatgctaccctgaagtcactcagtagtcagattgaaaccatgcgcagccccgatggctcgaaaaagcacccagcccgcacgtgtgatgacctaaagctttgccattccgcaaagcagagtggtgaatactggattgatcctaaccaaggatctgttgaagatgccatcaaagtttactgcaacatggaaacaggagaaacatgtatttcagcaaacccatccagtgtaccacgtaaaacctggtgggccagtaaatctcctgacaataaacctgtttggtatggtcttgatatgaacagagggtctcagttcgcttatggagaccaccaatcacctaatacagccattactcagatgacttttttgcgccttttatcaaaagaagcctcccagaacatcacttacatctgtaaaaacagtgtaggatacatggacgatcaagctaagaacctcaaaaaagctgtggttctcaaaggggcaaatgacttagatatcaaagcagagggaaatattagattccggtatatcgttcttcaagacacttgctctaagcggaatggaaatgtgggcaagactgtctttgaatatagaacacagaatgtggcacgcttgcccatcatagatcttgctcctgtggatgttggcggcacagaccaggaattcggcgttgaaattgggccagtttgttttgtgtaa

SEQ ID NO: 1042 - DNA, 134 bp, Homo sapiens
catcacattctctgctatgcccaccacccctatagatatgtcgctcttgggacccaaggtgctgctgtttcttgctgcattcatcatcacctctggtgagtcctttattctttgctccctaaaccctcagctcc

SEQ ID NO: 1043 - DNA, 111 bp, Homo sapiens
gtcactcacatctcttttctcttcctttgctatagactggatacccctgggggtcaatagtcaacgaggaggtaggtgaacccttggatacggctctgttggggttcttat

SEQ ID NO: 1044 - DNA, 103 bp, Homo sapiens
aaatgttttctaattttcttttcagacgatgtgactcaagcgactccagaaacattcacagaagatcctagtaagctacattttgtttgtttgtttgtttgct

SEQ ID NO: 1045 - DNA, 102 bp, Homo sapiens
tgactgcattttttcattccttgttatgtgtctttgcagatctggtgaatgatcccgctacagatgaaacaggtaaattttaccgcagttaaaaaaaaaatg

SEQ ID NO: 1046 - DNA, 109 bp, Homo sapiens
aatttgaagccctcctcatacctgctgttttgtgccttttcagttttggctgttttggctgatattgcaccttccacagatgacttgggtgagttcagatctggacccc

SEQ ID NO: 1047 - DNA, 109 bp, Homo sapiens
aattggtaacagtggaataaaatttctgcctttcagcctccctcagtgaaaaaaataccactgcaggtatgattgttgcttgcatgccttcttaagcctttttttcttc

SEQ ID NO: 1048 - DNA, 175 bp, Homo sapiens
tctatttggacctccttatttttttgtattgggcttcctcagagtgctgggatgagaaatttacctgcacaaggctctactctgtgcatcggccggttaaacaatgcattcatcagttatgcttcaccaggtaagggatcccagaatgcccaaaaagcatcttccatggtagtgt

SEQ ID NO: 1049 - DNA, 164 bp, Homo sapiens
cttccatctccttccttgcctatgacactgggacgtctgcagtttacgacgtatgtacatcgtcaacaaggagatctgctctcgtcttgtctgtaaggaacacgaagctatgaaaggtaagatgatgtctggatgtttaatggagagaagcagttatgagaagg

SEQ ID NO: 1050 - DNA, 537 bp, Homo sapiens
ttctgcattctcttcccatgatgttctgcttctcttctagatgagctttgccgtcagatggctggtctgccccctaggagactccgtcgctccaattacttccgacttcctccctgtgaaaatgtggatttgcagagacccaatggtctgtgatcattgaaaaagaggaaagaagaaaaaatgtatgggtgagaggaaggaggatctccttcttctccaaccattgacagctaacccttagacagtatttcttaaaccaatccttttgcaatgtccagcttttacccctactctctactttttcacccaaactgataacatttatctcattttctagcacttaaaatacaaagtctatattattgcataattttgctgcttctcaatatcatagacacagtgaatagatgatgactatatggcttatatacaaacattctatgtacaatttcaagggagactaaactttaggctaataatctttactattgaatctgtctgatatagatcttagggttgaagaagctatctttgtct

SEQ ID NO: 1051 - DNA, 1298 bp, Homo sapiens
atttgatggcgtgatgtctcacagaaagttctccgctcccagacatgggtccctcggcttcctgcctcggaagcgcagcagcaggcatcgtgggaaggtgaagagcttccctaaggatgacccgtccaagccggtccacctcacagccttcctgggatacaaggctggcatgactcacatcgtgcgggaagtcgacaggccgggatccaaggtgaacaagaaggaggtggtggaggctgtgaccattgtagagacaccacccatggtggttgtgggcattgtgggctacgtggaaacccctcgaggcctccggaccttcaagactgtctttgctgagcacatcagtgatgaatgcaagaggcgtttctataagaattggcataaatctaagaagaaggcctttaccaagtactgcaagaaatggcaggatgaggatggcaagaagcagctggagaaggacttcagcagcatgaagaagtactgccaagtcatccgtgtcattgcccacacccagatgcgcctgcttcctctgcgccagaagaaggcccacctgatggagatccaggtgaacggaggcactgtggccgagaagctggactgggcccgcgagaggcttgagcagcaggtacctgtgaaccaagtgtttgggcaggatgagatgatcgacgtcatcggggtgaccaagggcaaaggctacaaaggggtcaccagtcgttggcacaccaagaagctgccccgcaagacccaccgaggcctgcgcaaggtggcctgtattggggcatggcatcctgctcgtgtagccttctctgtggcacgcgctgggcagaaaggctaccatcaccgcactgagatcaacaagaagatttataagattggccagggctaccttatcaaggacggcaagctgatcaagaacaatgcctccactgactatgacctatctgacaagagcatcaaccctctgggtggctttgtccactatggtgaagtgaccaatgactttgtcatgctgaaaggctgtgtggtgggaaccaagaagcgggtgctcaccctccgcaagtccttgctggtgcagacgaagcggcgggctctggagaagattgaccttaagttcattgacaccacctccaagtttggccatggccgcttccagaccatggaggagaagaaagcattcatgggaccactgaagaaagaccgaattgcaaaggaagaaggagcttaatgccaggaacagattttgcagttggtggggtctcaataaaagttattttccactgaaaaaaaaaaaaaaaaaa

SEQ ID NO: 1052 - DNA, 1866 bp, Homo sapiens
ccgattcttgctcactgctcacccacctgctgctgccatgaggcaccttggggccttcctcttccttctgggggtcctgggggccctcactgagatgtgtgaaataccagagatggacagccatctggtagagaagttgggccagcacctcttaccttggatggaccggctttccctggagcacttgaaccccagcatctatgtgggcctacgcctctccagtctgcaggctgggaccaaggaagacctctacctgcacagcctcaagcttggttaccagcagtgcctcctagggtctgccttcagcgaggatgacggtgactgccagggcaagccttccatgggccagctggccctctacctgctcgctctcagagccaactgtgagtttgtcaggggccacaagggggacaggctggtctcacagctcaaatggttcctggaggatgagaagagagccattgggcatgatcacaagggccacccccacactagctactaccagtatggcctgggcattctggccctgtgtctccaccagaagcgggtccatgacagcgtggtggacaaacttctgtatgctgtggaacctttccaccagggccaccattctgtggacacagcagccatggcaggcttggcattcacctgtctgaagcgctcaaacttcaaccctggtcggagacaacggatcaccatggccatcagaacagtgcgagaggagatcttgaaggcccagacccccgagggccactttgggaatgtctacagcaccccattggcattacagttcctcatgacttcccccatgcctggggcagaactgggaacagcatgtctcaaggcgagggttgctttgctggccagtctgcaggatggagccttccagaatgctctcatgatttcccagctgctgcccgttctgaaccacaagacctacattgatctgatcttcccagactgtctggcaccacgagtcatgttggaaccagctgctgagaccattcctcagacccaagagatcatcagtgtcacgctgcaggtgcttagtctcttgccgccgtacagacagtccatctctgttctggccgggtccaccgtggaagatgtcctgaagaaggcccatgagttaggaggattcacatatgaaacacaggcctcctcgtcaggcccctacttaacctccgtgatggggaaagcggccggagaaagggagttctggcagcttctccgagaccccaacaccccactgttgcaaggtattgctgactacagacccaaggatggagaaaccattgagctgaggctggttagctggtagcccctgagctccctcatcccagcagcctcgcacactccctaggcttctaccctccctcctgatgtccctggaacaggaactcgcctgaccctgctgccacctcctgtgcactttgagcaatgccccctgggatcaccccagccacaagcccttcgagggccctataccatggcccaccttggagcagagagccaagcatcttccctgggaagtctttctggccaagtctggccagcctggccctgcaggtctcccatgaaggccaccccatggtctgatgggcatgaagcatctcagactccttggcaaaaaacggagtccgcaggccgcaggtgttgtgaagaccactcgttctgtggttggggtcctgcaagaaggcctcctcagcccgggggctatggccctgaccccagctctccactctgctgttagagtggcagctctgagctggttgtggcacagtagctggggagacctcagcagggctgctcagtgcctgcctctgacaaaattaaagcattgatggcctgtggacctgcaaaaaa

SEQ ID NO: 1053 - DNA, 491 bp, Homo sapiens
ccttttcctccctgtcgccaccgaggtcgcacgcgtgagacttctccgccgcctccgccgcagacgccgccgcgatgcgctacgtcgcctcctacctgctggctgccctagggggcaactcctcccccagcgccaaggacatcaagaagatcttggacagcgtgggtatcgaggcggacgacgaccggctcaacaaggttatcagtgagctgaatggaaaaaacattgaagacgtcattgcccagggtattggcaagcttgccagtgtacctgctggtggggctgtagccgtctctgctgccccaggctctgcagcccctgctgctggttctgcccctgctgcagcagaggagaagaaagatgagaagaaggaggagtctgaagagtcagatgatgacatgggatttggcctttttgattaaattcctgctcccctgcaaataaagcctttttacacatccaaaaaaaaaaaaaaaaaaaaaaaaaaaaaa

SEQ ID NO: 1054 - DNA, 456 bp, Homo sapiens
ggtcgcacgcgtgagacttctccgccgcctccgccgcagacgccgccgcgatgcgctacgtcgcctcctacctgctggctgccctagggggcaactcctcccccagcgccaaggacatcaagaagatcttggacagcgtgggtatcgaggcggacgacgaccggctcaacaaggttatcagtgagctgaatggaaaaaacattgaagacgtcattgcccagggtattggcaagcttgccagtgtacctgctggtggggctgtagccgtctctgctgccccaggctctgcagcccctgctgctggttctgcccctgctgcagcagaggagaagaaagatgagaagaaggaggagtctgaagagtcagatgatgacatgggatttggcctttttgattaaattcctgctcccctgcaaataaagcctttttacacatctcaaaaaaaaaaaaaaaaaa

SEQ ID NO: 1055 - DNA, 2388 bp, Homo sapiens; identical to SEQ ID NO: 957

SEQ ID NO: 1056 - DNA, 2136 bp, Homo sapiens
gaggtcatcatcagatttgaaatatttaaagtggatacaaaactatttcagcaatgcagacaattaagtgtgttgttgtgggcgatggtgctgttggtaaaacatgtctcctgatatcctacacaacaaacaaatttccatcggaatatgtaccgactgtttttgacaactatgcagtcacagttatgattggtggagaaccatatactcttggactttttgatactgcagggcaagaggattatgacagattacgaccgctgagttatccacaaacagatgtatttctagtctgtttttcagtggtctctccatcttcatttgaaaacgtgaaagaaaagtgggtgcctgagataactcaccactgtccaaagactcctttcttgcttgttgggactcaaattgatctcagagatgacccctctactattgagaaacttgccaagaacaaacagaagcctatcactccagagactgctgaaaagctggcccgtgacctgaaggctgtcaagtatgtggagtgttctgcacttacacagaaaggcctaaagaatgtatttgacgaagcaatattggctgccctggagcctccagaaccgaagaagagccgcaggtgtgtgctgctatgaacatctctccagagccctttctgcacagctggtgtcggcatcatactaaaagcaatgtttaaatcaaactaaagattaaaaattaaaattcgtttttgcaataatgacaaatgccctgcacctacccacatgcactcgtgtgagacaaggcccataggtatggccccccccttccccctcccagtactagttaattttgagtaattgtattgtcagaaaagtgattagtactatttttttttgttgtttcaaaaaaaaaatttttgtgtgtgtgtttttttttttttttttttttttttgttgtttaaaagcaaggcatgcttgtggatgactctgtaacagactaattggaattgttgaagctgctccctggttccactctggagagtaatctgggacatcttagtgttttgttttgtttttttccctcctcttttttttgggggggagtgtgtgtggggtttgttttttagtcttgtttttttaattcattaaccagtggttagcccttaaggggaggaggacggattgattccacattccacttcctagatctagtttagaaaacatgttccccatctggtgctcttaggaaggagtatagtaaatgcctcatttaataacatactcctttttgaaagttgccttttctctccacccttgagtagatccagtatttgatgaaactcatgaaagtgggtggagcccatcttgcccctcctcttttctaggacgcactatatgtgactgtgactttcaaggacatttgtttgccatttgctgatttttttgggaagttaatttctaacttctttcactgataaatgaagaaaagtattgcacctttgaaatgcaccaaatgaattgagtttgtaattaaaaaaatttttttccctttcagtcattgtcttatatgcttagcatagatttgcagctcagtagtatatggtgttcctagaatgcagctgaagacctgttatgtagaggaaatacgaggggtggtgctagaagacagacatctgtggaatgattcacatcctctcaagttaggaggatggaggcctgcttcattaagaagctgggggtagggtgggggtggggagaacacttaacaacatggggaccagtcaggggaatccccttatttctgttttgcatatgaggaaccctagagcagccaggtgaggctctctagtttaataaaaatcatggaaagactcttaatgcagactcttcttaagtgttaatagggattttttcagcttattttggttgcagtttccaatttttaaaaatgttgaggtaatctttcccaccttcccaaacctaattcttgtagatgcattagtgttgaaccaatgctttctcatgtctcaattctttgtatatgcattcttttcagatgtattaaacaaacaaaaacccttcaaaaaaaaaaaaaaaaaaaaaaaaaaaaaaaaaaaaaaaaaaaaaaaaaaaaaaaaaaaaaaaaaaaaaaaaaaaaaaa

SEQ ID NO: 1057 - DNA, 1175 bp, Homo sapiens
ccccggtggagaagctgaggtcatcatcagatttgaaatatttaaagtggatacaaaattatttcagcaatgcagacaattaagtgtgttgttgtgggcgatggtgctgttggtaaaacatgtctcctgatatcctacacaacaaacaaatttccatcggaatatgtaccgactgtttttgacaactatgcagtcacagttatgattggtggagaaccatatactcttggactttttgatactgcagggcaagaggattatgacagattacgaccgctgagttatccacaaacagatgtatttctagtctgtttttcagtggtctctccatcttcatttgaaaacgtgaaagaaaagtgggtgcctgagataactcaccactgtccaaagactcctttcttgcttgttgggactcaaattgatctcagagatgacccctctactattgagaaacttgccaagaacaaacagaagcctatcactccagagactgctgaaaagctggcccgtgacctgaaggctgtcaagtatgtggagtgttctgcacttacacagaaaggcctaaagaatgtatttgacgaagcaatattggctgccctggagcctccagaaccgaagaagagccgcaggtgtgtgctgctatgaacatctctccagagccctttctgcacagctggtgtcggcatcatactaaaagcaatgtttaaatcaaactaaagattaaaaattaaaattcgtttttgcaataatgacaaatgccctgcacctacccacatgcactcgtgtgagacaaggcccataggtatggccccccccttccccctcccagtactagttaattttgagtaattgtattgtcagaaaagtgattagtactatttttttttgttgtttcaaaaaaaaaatttttgtgtgtctgtttttttttttttttttttttgttgtttaaaaggaaggcatgcttgtggatgactctgtaacagactaattggaattgttgaagctgctccctggttccactctggagagtaatctgggacatcttagtgttttgttttgtttttttccctcctcttttttttgggggggagtgtgtggggggtttgttttttagtcttgtttttttaattcattaaccagtggttaagcccttaagggaggaggacggattgatt

SEQ ID NO: 1058 - DNA, 594 bp, Homo sapiens
gtcactcctgccttcaccatgaagtccagcggcctcttccccttcctggtgctgcttgccctgggaactctggcaccttgggctgtggaaggctctggaaagtccttcaaagctggagtctgtcctcctaagaaatctgcccagtgccttagatacaagaaacctgagtgccagagtgactggcagtgtccagggaagaagagatgttgtcctgacacttgtggcatcaaatgcctggatcctgttgacaccccaaacccaacaaggaggaagcctgggaagtgcccagtgacttatggccaatgtttgatgcttaacccccccaatttctgtgagatggatggccagtgcaagcgtgacttgaagtgttgcatgggcatgtgtgggaaatcctgcgtttcccctgtgaaagcttgattcctgccatatggaggaggctctggagtcctgctctgtgtggtccaggtcctttccaccctgagacttggctccaccactgatatcctcctttggggaaaggcttggcacacagcaggctttcaagaagtgccagttgatcaatgaataaataaacgagcctatttctctttgcac

SEQ ID NO: 1059 - DNA, 82 bp, Homo sapiens
atgatcctaaacaaagctctgctgctgggggccctcgctctgaccaccgtgatgagcccctgtggaggtgaagacattgtgg

SEQ ID NO: 1060 - DNA, 1030 bp, Homo sapiens
ggtgaagacattgtggctgaccacgttgcctcttgtggtgtaaacttgtaccagttttacggtccctctggccagtacacccatgaatttgatggagatgagcagttctacgtggacctggagaggaaggagactgcctggcggtggcctgagttcagcaaatttggaggttttgacccgcagggtgcactgagaaacatggctgtggcaaaacacaacttgaacatcatgattaaacgctacaactctaccgctgctaccaatgaggttcctgaggtcacagtgttttccaagtctcccgtgacactgggtcagcccaacaccctcatttgtcttgtggacaacatctttcctcctgtggtcaacatcacatggctgagcaatgggcagtcagtcacagaaggtgtttctgagaccagcttcctctccaagagtgatcattccttcttcaagatcagttacctcaccttcctcccttctgctgatgagatttatgactgcaaggtggagcactggggcctggaccagcctcttctgaaacactgggagcctgagattccagcccctatgtcagagctcacagagactgtggtctgtgccctggggttgtctgtgggcctcatgggcattgtggtgggcactgtcttcatcatccaaggcctgcgttcagttggtgcttccagacaccaagggccattgtgaatcccatcctggaagggaaggtgcatcgccatctacaggagcagaagaatggacttgctaaatgacctagcactattctctggcccgatttatcatatcccttttctcctccaaatatttctcctctcaccttttctctgggacttaagctgctatatcccctcagagctcacaaatgcctttacattctttccctgacctcctgattttttttttcttttctcaaatgttacctacaatacatgcctggggtaagccacccggctacctaattcctcagtaacctccatctaaaatctccaaggaagcaataaattccttttatgag

SEQ ID NO: 1061 - DNA, 4258 bp, Homo sapiens
gatctgtgggtgacaggccttccggggatgctggaggagacacgggcctgaccccatggcctcaggaatgccctcacgcagccctgtcttctctttcagagctcccctgaacagcagctgcagcagccatggccccgccctgggtgcccgccatgggcttcacgctggcgcccagcctggggtgcttcgtgggctcccgctttgtccacggcgagggtctccgctggtacgccggcctgcagaagccctcgtggcacccgccccactgggtgctgggccctgtctggggcacgctctactcagccatggggtaggtgggcgtgcactggtcctggggataagcctggccctttgcaaggggaggccaggccaggacagagggtcttctccaggcgggccatggaccatggcatggtttcccctgccccatttggcaagccagggtggggaagctgtgggcctgtcgattgcacaactgaacttctcctcctgggcccctgggggatgggtcagatgctcaccccaccctggcatccccgccatgttcacagctccaggcagaggccggcttagtgtgtgaaggttggtcttgggcagaggcatggacgctaagattaacaacggcagcaacagccccaagagcagctcctttgttgaactcctgcccagtgccaggctcgtctcattcatactcaacgacccccataataagaggcctcccaaggacacagggcttgcaagtgtggaccccccacagccccttcaggctcagtctggcctgagtcccctgggaatagaccaggggaattccacccggaaaggacgtgctgggaggggcagggcgcctcttggtggctgtagcggggaccacacccaggaggcagggaattgactgccttctgaaatgttccctgcatcctggttctgtgccagcgcagtgcagggtggggacgcaggtgccaggcactctagggggcggatagcagaggccaggccaggtgcccggctctgatgggaataaggccctggaacttgggtgtcacgtgggcctcacccctcctggcccaggccctgcccagccagggtcctgcacttccctggctccagtgtccccaccctgcttggccttcctacaccacccagtcccagcctctcttcgggggaaattttggggctccctgtggctctggataaggcgaacccctcattagtaggtgacagccggggctctggcctcgtgaccagactttatccactgatggcctgccaagagatctcagtcacttcaccgcctcagtctcctcactgtaaagggggtgctgattactgcctgccttaatggcatcattcatgagactgaaatgagtgaatgcttgggaagtggtagggcctggctcctgtgagtgctggagggcatcggctgctgttactggtggtgttatcgttgccctgtgttaacagctcccatgatcaggcctccccctggacctcaccctgcagtcacagactgactcagggtctcacatctgcctcaaagcctttgcatgtcctgtttcctcccctggaaaactcctattcatcatttaaggcccaggccaaatgtcccatcctctatgcagtgccctggctaggttaagagcctcctctctacctattcacaccatgtgcttccctttcatagcagtgacagtgataataatggcaggtatttactgagtgtcctaaatgctgggtatcgcataagcactgccaatgtgctaactagaatctctacagcaaccctatgaaaaatgaaggcccagacaggtcaaggcaacttccctgagatcacacagcagtcagtgtcaggtcacgtatgaaccatcactgtgccactcggaggtgggcaacgctcctggccttgttcctaatggtgctctgaactgcggcctctgtttcaggtacggctcctacctggtctggaaagagctgggaggcttcacagagaaggctgtggttcccctgggcctctacactgggcagctggccctgaactgggcatggccccccatcttctttggtgcccgacaaatgggctgggtaagtgtggccacagcatgtgtccctgatccctggatccgacccttggaggacgtggggcatcacatatgacactgggtcagtgtctataggcggggccaggggagacaaaaggccatgtctctctagctgtaacagcccacaccctggagcctcccctctactgactcctccggtgagggaagctattaaagcagaaggggttgcaggggtgggtttgggggccactgtgtaggaaaacccacacaagcctggtactgtgtgggcagggtcactggcccctctacataacagcttcttcttttttttttttgagacagagtctcactctctcacccaggctggagtgcagtggtgagatctcggcccactgcaacctccacctcctgggttcaagtgattcccttgcctcagcctcccgagtagctgggactacggtgtgcaccaccactcctggctaatttttgtatttgtatttgtatttttttagtagagatggggtttcactatgttggccaggctggtcttgaactcctgacctcaggtgatctacccgccttggcctctcaaagtgctgggattacaggtgtaagccaccgcgcccggctgactgcttcttttttaaagttttaaacttttttaagagatgaagactcgctgtgttgcccagggcagactcgacttcctgggctcaaacgattgattctcccgcctttacctcttgagtagctgggactccaggtcacgtcactgtgcccggcagccttttttttttggagacagagtcttacctgttgcccaggctggagtgcagtggcatgatctcggctcactgcagactccacctcccaggttcaagtgattctcctgtctcagcctcccgagtagctgggattacaggcatgcagcaccatgtccagctaattttctgtatttttttttttttgagacggagtcgctctgttgcccaggctggagtgcagtggcgtgatctcagctcactgcaacctccgtctcccaggttcaagcaattctcctgcctcagcctcctgagtagctgggactacaggcacgtgctacacgcctggctaatttttttatttttagtagagacggggttttaccatattggtcaggttggtcttgaactcctgacctgcaggtgatccacccgtctcagcctcccaaagtgctgggattcacaggcgtgagccactgcacctggacaaatagcaagtttttgtttgggcctagtagtaatgctgggaggtcagcatcgctctcagtggaggctctaagctcaggggaaggacgtgcaagacctcctaagccaccaccgcacccttgcaacaaaccgagttcacttcaggcatgtcatgtgcaccccacacaaggcatgggtcaggtggcatactgttcccattttacagatgaggaaactgaggctgcgatgggggaggggcttggccaggtcactcaagggtggagtgggggtgagtgaggctcctgactcccaaatccagtgggagttgggcagtgggacaggcacttgggtgaacgcggtgcctcaggcctccccatcctccgtcccccaatctctgcaggccttggtggatctcctgctggtcagtggggcggcggcagccactaccgtggcctggtaccaggtgagcccgctggccgcccgcctgctctacccctacctggcctggctggccttcacgaccacactcaactactgcgtatggcgggacaaccatggctggcgtgggggacggcggctgccagagtgagtgcccggcccaccagggactgcagctgcaccagcaggtgccatcacgcttgtgatgtggtggccgtcacgctttcatgaccactgggcctgctagtctgtcagggccttggcccaggggtcagcagagcttcagaggtggccccactgagcccccacccgggagcagtgtcctgtgctttctgcatgcttagagcatgttcttggaacatggaattttataagctgaataaagtttttgacttcctttaccatggcctttttgcttgggtgggacccctggccacaggaagagggggagctggggctgcactggagctcgtctctgcaggatctgcctgggctgccttctccagacagggctggatccagctggggctgccccac

SEQ ID NO: 1062 - DNA, 2512 bp, Homo sapiens
ggcgagagcccggcacagcccggaccgaaattttgccgctgccttagagcgttagacaggatgtggctgggccgccgggccctgtgcgctctggtccttctgctcgcctgcgcctcgctggggctcctgtacgcgagcacccgggacgcgcccggcctccggctacctcttgcgccgtgggcgcccccgcaaagcccccgcaggcccgagctgccagatcttgctcctgagccccgctacgcacacatcccggtcaggatcaaggagcaagtagtggggctgctggcttggaacaactgcagttgtgagtccagtggggggggcctccccctccccttccagaaacaagtccgagctattgacctcaccaaggcctttgaccctgcagagctgagggctgcctctgccacaagagagcaggagttccaggcctttctgtcgaggagccagtccccagctgaccagctgctcatagcccctgccaactccccgctccagtaccccctacagggtgtggaagttcagcccctcaggagcatcttggtgccagggctgagccttcaggcagcttctggtcaggaggtataccaggtgaacctgactgcctccctaggcacctgggacgtggcaggggaagtgactggagttactctcactggagagggtcaggcagatctcacccttgtcagcccagggctggaccaactcaacaggcaactacaactggtcacttacagcagccgaagctaccagaccaacacagcagacacagtccggttctccaccgagggacatgaggctgctttcactatccgcataagacacccgcccaaccctcggctgtacccacctgggtctctaccccagggagcccagtacaacatcagcgctctagtcacgattgccaccaagaccttcctccgttatgatcggctacgggctctcatcaccagtatccgccgcttctacccaacggttaccgtggtcatcgctgacgacagcgacaagccagagcgcgttagtggcccctacgtggaacactatctcatgcccttcggcaagggctggttcgcaggccggaacctggccgtgtctcaagtaaccaccaagtacgtgctgtgggtggacgacgacttcgtcttcacggcgcggacgcggctggagaggcttgtggacgtgctggagcggacgccgctggacctggtggggggcgcggtgcgcgagatctccggctttgccaccacttatcggcagctgctgagcgtggagcccggcgccccaggcctcgggaactgcctccggcaaaggcgcggcttccaccacgagctcgtcggcttcccaggctgcgtggtcaccgacggcgtggttaacttcttcctggcgcggactgacaaggtgcgcgaggtcggtttcgacccccgcctcagccgcgtggctcatctggaattcttcttggatgggcttggttcccttcgggttggctcctgctccgacgtcgtggtggatcatgcatccaaactgaagctgccttggacatcaagggatgccggagcagagacttacgcccggtaccgttacccaggatcactggacgagagccagatggccaaacaccggctgctcttcttcaaacaccggctgcagtgcatgacctcccagtgatggcccgctggggatttctgactgtcaggctgggcctgcctccttgtccctgccaggaatttccaacaaaccccaccaccctgtgagcactctactggctgtccctgagcctctagttcctcactcttccttttcagaacctgatgcccagtaggggttgtcctggtgacacccctcctttttccagtgcccagaggcctggtggagccataacctctcccacagccagtgccaagtcctccccctgcccattctcatggggcaggaaatggggggatcactttccaagtgccaaagagcccagagggactctaagaacctaaggtggaaacactgtcctctcatcttgggaccgagggggtggggaagttccccaacacataatcccaagactgtgcccctcatctgcatcttcagatccagtactctgtgtacctgctccagccccacccccacagagagaacttgtggctctggggctggggtgagggctggtggttggtgaaagccattcttagttgtgtctctgcaatgctgtgggcacaaaagaaggggcaccagagtccctgtgcaaacacctagactcacttcatggattccaaagctctcagcttcattttattagttacgttaggtaagggggttcaagggtcatggtcctcatcacacacatgtcatcagggccctcctgcactccacatgatgaggtcagacccacacggtgcaaatctttgggtcagtgagctcctggagaagagaggagacatgtcaggaatagattaggcacccctcttccttaatgaaatgtggcagtcctctcaggggtaccccacctacttagggatctgag

SEQ ID NO: 1063 - DNA, 8878 bp, Homo sapiens; identical to SEQ ID NO: 1019

SEQ ID NO: 1064 - DNA, 2541 bp, Homo sapiens
tgagaccaaatttacaaaaaaacgaaaaaaataaggattgactgggctacctcagcatacatttctgccacattcttaagtagcaaaaaaggaaaagtgctttcctcctctgcaggatgtaaggtttatcagccattaaaacttagacttctctagcttttcactagctgtgaaccagccttcctgtccatggacgtgaaactgcatagtaatgagactgtgcacactgatgtttacaagattgaaagagtctttctccgaaaatcatggtaaagaatactgagacaatgaaaaaaaatcaacaaatatgctttctggagaactgtaccttttatggtttgcttgcacatcagtagtttctgctgaacgtgctgtcataatgaagagatttccaggattttttttcctgattagaactggtagccagtatattaaatattgatataaaaataaaagaactggaaccagattccgaatcttgaaaacaacattttttacaacaaacaaaaaaactatattaaacagggtttaaaggaaaattaaaacagaactatgaagaagtacaatttgttatagtatagtatcaaatttctatatagattttatacctcagtggggaaaaataactgattccaatgacattcattttgttttcatctgtgatagtcatggatgcttttattttccttggggtgctgaaattgagctgaaaaaaaaaggctctttgaatatagttttaatttctctctacagttttttttgtttggtttgtgggctgttggaattgtaatttttaattgccttctaaaaaatggaaatttaacaatgtctgatctcagctgaacaaattagatgtttcagttgctcttgggtcaactggcttacagatttacatgtgcacacacacacaaatttcttatcacattttcgacttcttcacttgacctaactgattatgcgaaatacccaagattcatgctactgttccacatttgttttcacagcaataaatcttcagttctgttgtttatgattccacttaacaaggggcctgcaaatgtgatttattatttgggtatttggagataatacatttgagggttttttggaaaacctttttcactccatactcaaatatgcttcattgtcaaatgcatatttaaattaaattattgaattgtaatgtttatctgctgctttttttaaataaaatttgactgaaaatgtttaattggcattttttaatgacttacccaagaaaagtgcagctattattccatattaataggcttgcatttcttttcctaaatcttatttaggctaaatcagttttattgtcctctgattttttttaataccacagaaatcacctgagtgtcaattgaaaagttgtcaattaaaaggtaaccttttaactctcgtaggaggaatctcattaagacatttttcctgatatgtagagcagtctgttggcaaaaatgcatatattttctttcatatttgtaaaattatatttaatggaattcttttctttgattatcaaggactttcactgcaggcagtgctatttcttgtgcctaagaatgtttccaaaagtcgcatcgctaatgatatttgccaagttgagtgtacacaaagtttctcatatcctgttcaagttaatcaacatcaaacacatggggatgctttagggtgagtctataatacaaaatgcataaaccatgtccccaggaaatttgaaaggaagcaagtgctgaatggaatttttttccttttccatgagctgtgttaattctatctccagtaggcctaatgcttgaaataagcaagatgtctaatcaataaattattttcatgctcagaatttcaggtttttgtactccagcatagcttggtcttatttcttactgtatgaaagcttaacagcaatgtgatttaaggttttgttttaaatgggagatgtaagtgatttaattcatgggtacttttagaacctgatagataatcccattgcctttatttttctaattaaagaatcctaaatactttgaaaatacaaaatattcctgaatagttgtgccttacattggttttatttgaagttagagtggatccctgtttatcataattacttataattaggcagatgcttatcactctattataactcaaattgggaagaaaagaatgaaaaagaaaacaatggctgggtactggctcatacctgtaattttagcattttgggaaggtgagacgataggaccacttgagggcaggagtttgaggttgcagtgagctatgatggtgccactgcactccagcctgggcaacagagaagaaaccatgtatcttaaaaaaaaagaaaaaatgaaggatgaaaaagtgggattattatttaaccagtgaagaattcataaatgtgacaattaaggataatttgaatctcacaaatctattcaccccaccccagtcaaggtctatttaatatatctatcttcattggcattcttgagaaataatgctgccattgaacattggggg

SEQ ID NO: 1065 - protein, 129 aa, Homo sapiens; identical to SEQ ID NO: 363

SEQ ID NO: 1066 - protein, 91 aa, Homo sapiens; identical to SEQ ID NO: 364

SEQ ID NO: 1067 - protein, 256 aa, Homo sapiens; identical to SEQ ID NO: 365

SEQ ID NO: 1068 - protein, 280 aa, Homo sapiens; identical to SEQ ID NO: 366

SEQ ID NO: 1069 - protein, 620 aa, Homo sapiens; identical to SEQ ID NO: 367

SEQ ID NO: 1070 - protein, 1159 aa, Homo sapiens; identical to SEQ ID NO: 368

SEQ ID NO: 1071 - protein, 406 aa, Homo sapiens; identical to SEQ ID NO: 369

SEQ ID NO: 1072 - protein, 154 aa, Homo sapiens; identical to SEQ ID NO: 370

SEQ ID NO: 1073 - protein, 472 aa, Homo sapiens; identical to SEQ ID NO: 371

SEQ ID NO: 1074 - protein, 434 aa, Homo sapiens; identical to SEQ ID NO: 373

SEQ ID NO: 1075 - protein, 323 aa, Homo sapiens; identical to SEQ ID NO: 374

SEQ ID NO: 1076 - protein, 599 aa, Homo sapiens; identical to SEQ ID NO: 375

SEQ ID NO: 1077 - protein, 994 aa, Homo sapiens; identical to SEQ ID NO: 376

SEQ ID NO: 1078 - protein, 101 aa, Homo sapiens; identical to SEQ ID NO: 377

SEQ ID NO: 1079 - protein, 2649 aa, Homo sapiens; identical to SEQ ID NO: 378

SEQ ID NO: 1080 - protein, 68 aa, Homo sapiens
MVYYPELFVWVSQEPFPNKDMEGRLPKGRLPVPKEVNRKKNDETNAASLTPLGSSELRSPRISYLHFF

SEQ ID NO: 1081 - protein, 233 aa, Homo sapiens; identical to SEQ ID NO: 379

SEQ ID NO: 1082 - protein, 441 aa, Homo sapiens; identical to SEQ ID NO: 382

SEQ ID NO: 1083 - protein, 219 aa, Homo sapiens; identical to SEQ ID NO: 383

SEQ ID NO: 1084 - protein, 569 aa, Homo sapiens; identical to SEQ ID NO: 384

SEQ ID NO: 1085 - protein, 825 aa, Homo sapiens; identical to SEQ ID NO: 385

SEQ ID NO: 1086 - protein, 354 aa, Homo sapiens; identical to SEQ ID NO: 386

SEQ ID NO: 1087 - protein, 374 aa, Homo sapiens; identical to SEQ ID NO: 387

SEQ ID NO: 1088 - protein, 232 aa, Homo sapiens; identical to SEQ ID NO: 388

SEQ ID NO: 1089 - protein, 375 aa, Homo sapiens; identical to SEQ ID NO: 389

SEQ ID NO: 1090 - protein, 825 aa, Homo sapiens; identical to SEQ ID NO: 385

SEQ ID NO: 1091 - protein, 769 aa, Homo sapiens; identical to SEQ ID NO: 391

SEQ ID NO: 1092 - protein, 464 aa, Homo sapiens; identical to SEQ ID NO: 392

SEQ ID NO: 1093 - protein, 463 aa, Homo sapiens; identical to SEQ ID NO: 393

SEQ ID NO: 1094 - protein, 72 aa, Homo sapiens
MSYQQQQCKQPCQPPPVCPTPKCPEPCPPPKCPEPCPPPKCPQPCPPQQCQQKYPPVTPSPPCQSKYPPKSK

SEQ ID NO: 1095 - protein, 348 aa, Homo sapiens; identical to SEQ ID NO: 394

SEQ ID NO: 1096 - protein, 406 aa, Homo sapiens; identical to SEQ ID NO: 396

SEQ ID NO: 1097 - protein, 417 aa, Homo sapiens; identical to SEQ ID NO: 397

SEQ ID NO: 1098 - protein, 1010 aa, Homo sapiens; identical to SEQ ID NO: 398

SEQ ID NO: 1099 - protein, 1304 aa, Homo sapiens; identical to SEQ ID NO: 400

SEQ ID NO: 1100 - protein, 618 aa, Homo sapiens; identical to SEQ ID NO: 401

SEQ ID NO: 1101 - protein, 757 aa, Homo sapiens; identical to SEQ ID NO: 402

SEQ ID NO: 1102 - protein, 281 aa, Homo sapiens; identical to SEQ ID NO: 403

SEQ ID NO: 1103 - protein, 309 aa, Homo sapiens; identical to SEQ ID NO: 404

SEQ ID NO: 1104 - protein, 369 aa, Homo sapiens; identical to SEQ ID NO: 405

SEQ ID NO: 1105 - protein, 79 aa, Homo sapiens [sequence omitted]

SEQ ID NO: 1106 - protein, 632 aa, Homo sapiens; identical to SEQ ID NO: 408

SEQ ID NO: 1107 - protein, 175 aa, Homo sapiens; identical to SEQ ID NO: 409

SEQ ID NO: 1108 - protein, 979 aa, Homo sapiens; identical to SEQ ID NO: 411

SEQ ID NO: 1109 - protein, 331 aa, Homo sapiens; identical to SEQ ID NO: 412

SEQ ID NO: 1110 - protein, 819 aa, Homo sapiens; identical to SEQ ID NO: 413

SEQ ID NO: 1111 - protein, 93 aa, Homo sapiens; identical to SEQ ID NO: 414

SEQ ID NO: 1112 - protein, 144 aa, Homo sapiens; identical to SEQ ID NO: 415

SEQ ID NO: 1113 - protein, 277 aa, Homo sapiens; identical to SEQ ID NO: 416

SEQ ID NO: 1114 - protein, 2261 aa, Homo sapiens; identical to SEQ ID NO: 417

SEQ ID NO: 1115 - protein, 1721 aa, Homo sapiens; identical to SEQ ID NO: 418

SEQ ID NO: 1116 - protein, 933 aa, Homo sapiens; identical to SEQ ID NO: 419

SEQ ID NO: 1117 - protein, 198 aa, Homo sapiens; identical to SEQ ID NO: 420

SEQ ID NO: 1118 - protein, 332 aa, Homo sapiens; identical to SEQ ID NO: 421

SEQ ID NO: 1119 - protein, 217 aa, Homo sapiens; identical to SEQ ID NO: 422

SEQ ID NO: 1120 - protein, 764 aa, Homo sapiens; identical to SEQ ID NO: 423

SEQ ID NO: 1121 - protein, 371 aa, Homo sapiens
MWRSLGLALALCLLPSGGTESQDQSSLCKQPPAWSIRDQDPMLNSNGSVTVVALLQASYLCIIEASKLEDLRVKLKKEGYSNISYIVVNHQGISSRLKYTHLKNKVSEHIPVYQQEENQTDVWTLLNGSKDDFLIYDRCGRLVYHLGLPFSFLTFPYVEEAIKIAYCEKKCGNCSLTTLKDEDFCKRVSLATVDKTVETPSPHYHHEHHHNHGHQHLGSSELSENQQPGAPNAPTHPAPPGLHHHHKHKGQHRQGHPENRDMPASEDLQDLQKKLCRKRCINQLLCKLPTDSELAPRSCCHCRHLIFEKTGSAITQCKENLPSLCSQGLRAEENITESCQRLPPAAQISQQLIPTEASASRKNQAKKEPSN

SEQ ID NO: 1122 - protein, 923 aa, Homo sapiens; identical to SEQ ID NO: 425

SEQ ID NO: 1123 - protein, 165 aa, Homo sapiens; identical to SEQ ID NO: 65

SEQ ID NO: 1124 - protein, 406 aa, Homo sapiens; identical to SEQ ID NO: 66

SEQ ID NO: 1125 - protein, 286 aa, Homo sapiens; identical to SEQ ID NO: 426

SEQ ID NO: 1126 - protein, 381 aa, Homo sapiens; identical to SEQ ID NO: 68

SEQ ID NO: 1127 - protein, 318 aa, Homo sapiens; identical to SEQ ID NO: 428

SEQ ID NO: 1128 - protein, 411 aa, Homo sapiens; identical to SEQ ID NO: 72

SEQ ID NO: 1129 - protein, 913 aa, Homo sapiens
MGWGSRCCCPGRLDLLCVLALLGGCLLPVCRTRVYTNHWAVKIAGGFPEANRIASKYGFINIGQIGALKDYYHFYHSRTIKRSVISSRGTHSFISMEPKVEWIQQQVVKKRTKRDYDFSRAQSTYFNDPKWPSMWYMHCSDNTHPCQSDMNIEGAWKRGYTGKNIVVTILDDGIERTHPDLMQNYDALASCDVNGNDLDPMPRYDASNENKHGTRCAGEVAAAANNSHCTVGIAFNAKIGGVRMLDGDVTDMVEAKSVSFNPQHVHIYSASWGPDDDGKTVDGPAPLTRQAFENGVRMGRRGLGSVFVWASGNGGRSKDHCSCDGYTNSIYTISISSTAESGKKPWYLEECSSTLATTYSSGESYDKKIITTDLRQRCTDNHTGTSASAPMAAGIIALALEANPFLTWRDVQHVIVRTSRAGHLNANDWKTNAAGFKVSHLYGFGLMDAEAMVMEAEKWTTVPRQHVCVESTDRQIKTIRPNSAVRSIYKASGCSDNPNRHVNYLEHVVVRITITHPRRGDLAIYLTSPSGTRSQLLANRLFDHSMEGFKNWEFMTIHCWGERAAGDWVLEVYDTPSQLRNFKTPGKLKEWSLVLYGTSVQPYSPTNEFPKVERFRYSRVEDPTDDYGTEDYAGPCDPECSEVGCDGPGPDHCNDCLHYYYKLKNNTRICVSSCPPGHYHADKKRCRKCAPNCESCFGSHGDQCMSCKYGYFLNEETNSCVTHCPDGSYQDTKKNLCRKCSENCKTCTEFHNCTECRDGLSLQGSRCSVSCEDGRYFNGQDCQPCHRFCATCAGAGADGCINCTEGYFMEDGRCVQSCSISYYFDHSSENGYKSCKKCDISCLTCNGPGFKNCTSCPSGYLLDLGMCQMGAICKDATEESWAEGGFCMLVKKNNLCQRKVLQQLCCKTCTFQG

SEQ ID NO: 1130 - protein, 99 aa, Homo sapiens; identical to SEQ ID NO: 429

SEQ ID NO: 1131 - protein, 92 aa, Homo sapiens; identical to SEQ ID NO: 430

SEQ ID NO: 1132 - protein, 533 aa, Homo sapiens; identical to SEQ ID NO: 431

SEQ ID NO: 1133 - protein, 352 aa, Homo sapiens [sequence omitted]

SEQ ID NO: 1134 - protein, 446 aa, Homo sapiens; identical to SEQ ID NO: 433

SEQ ID NO: 1135 - protein, 757 aa, Homo sapiens; identical to SEQ ID NO: 434

SEQ ID NO: 1136 - protein, 524 aa, Homo sapiens; identical to SEQ ID NO: 435

SEQ ID NO: 1137 - protein, 2355 aa, Homo sapiens; identical to SEQ ID NO: 436

SEQ ID NO: 1138 - protein, 599 aa, Homo sapiens; identical to SEQ ID NO: 375

SEQ ID NO: 1139 - protein, 376 aa, Homo sapiens; identical to SEQ ID NO: 438

SEQ ID NO: 1140 - protein, 191 aa, Homo sapiens; identical to SEQ ID NO: 439

SEQ ID NO: 1141 - protein, 269 aa, Homo sapiens; identical to SEQ ID NO: 440

SEQ ID NO: 1142 - protein, 159 aa, Homo sapiens; identical to SEQ ID NO: 441

SEQ ID NO: 1143 - protein, 1028 aa, Homo sapiens
MRAARALLPLLLQACWTAAQDEPETPRAVAFQDCPVDLFFVLDTSESVALRLKPYGALVDKVKSFTKRFIDNLRDRYYRCDRNLVWNAGALHYSDEVEIIQGLTRMPGGRDALKSSVDAVKYFGKGTYTDCAIKKGLEQLLVGGSHLKENKYLIVVTDGHPLEGYKEPCGGLEDAVNEAKHLGVKVFSVAITPDHLEPRLSIIATDHTYRRNFTAADWGQSRDAEEAISQTIDTIVDMIKNNVEQVCCSFECQPARGPPGLRGDPGFEGERGKPGLPGEKGEAGDPGRPGDLGPVGYQGMKGEKGSRGEKGSRGPKGYKGEKGKRGIDGVDGVKGEMGYPGLPGCKGSPGFDGIQGPPGPKGDPGAFGLKGEKGEPGADGEAGRPGARGPSGDEGPAGEPGPPGEKGEAGDEGNPGPDGAPGERGGPGERGPRGTPGPRGPRGDPGEAGPQGDQGREGPVGVPGDPGEAGPIGPKGYRGDEGPPGSEGARGAPGPAGPPGDPGLMGERGEDGPAGNGTEGFPGFPGYPGNRGAPGINGTKGYPGLKGDEGEAGDPGDDNNDIAPRGVKGAKGYRGPEGPQGPPGHQGPPGPDECEILDIIMKMCSCCECKCGPIDLLFVLDSSESIGLQNFEIAKDFVVKVIDRLSRDELVKFEPGQSYAGVVQYSHSQMQEHVSLRSPSIRNVQELKEAIKSLQWMAGGTFTGEALQYTRDQLLPPSPNNRIALVITDGRSDTQRDTTPLNVLCSPGIQVVSVGIKDVFDFIPGSDQLNVISCQGLAPSQGRPGLSLVKENYAELLEDAFLKNVTAQICIDKKCPDYTCPITFSSPADITILLDGSASVGSHNFDTTKRFAKRLAERFLTAGRTDPAHDVRVAVVQYSGTGQQRPERASLQFLQNYTALASAVDAMDFINDATDVNDALGYVTRFYREASSGAAKKRLLLFSDGNSQGATPAAIEKAVQEAQRAGIEIFVVVVGRQVNEPHIRVLVTGKTAEYDVAYGESHLFRVPSYQALLRGVFHQTVSRKVALG

SEQ ID NO: 1144 - protein, 1629 aa, Homo sapiens; identical to SEQ ID NO: 443

SEQ ID NO: 1145 - protein, 956 aa, Homo sapiens; identical to SEQ ID NO: 444

SEQ ID NO: 1146 - protein, 350 aa, Homo sapiens; identical to SEQ ID NO: 445

SEQ ID NO: 1147 - protein, 428 aa, Homo sapiens; identical to SEQ ID NO: 447

SEQ ID NO: 1148 - protein, 463 aa, Homo sapiens; identical to SEQ ID NO: 448

SEQ ID NO: 1149 - protein, 161 aa, Homo sapiens; identical to SEQ ID NO: 449

SEQ ID NO: 1150 - protein, 368 aa, Homo sapiens; identical to SEQ ID NO: 450

SEQ ID NO: 1151 - protein, 1466 aa, Homo sapiens; identical to SEQ ID NO: 451

SEQ ID NO: 1152 - protein, 705 aa, Homo sapiens; identical to SEQ ID NO: 452

SEQ ID NO: 1153 - protein, 1220 aa, Homo sapiens; identical to SEQ ID NO: 454

SEQ ID NO: 1154 - protein, 153 aa, Homo sapiens; identical to SEQ ID NO: 455

SEQ ID NO: 1155 - protein, 291 aa, Homo sapiens; identical to SEQ ID NO: 457

SEQ ID NO: 1156 - protein, 303 aa, Homo sapiens; identical to SEQ ID NO: 458

SEQ ID NO: 1157 - protein, 445 aa, Homo sapiens; identical to SEQ ID NO: 459

SEQ ID NO: 1158 - protein, 730 aa, Homo sapiens; identical to SEQ ID NO: 461

SEQ ID NO: 1159 - protein, 212 aa, Homo sapiens; identical to SEQ ID NO: 462

SEQ ID NO: 1160 - protein, 738 aa, Homo sapiens; identical to SEQ ID NO: 463

SEQ ID NO: 1161 - protein, 1838 aa, Homo sapiens; identical to SEQ ID NO: 464

SEQ ID NO: 1162 - protein, 320 aa, Homo sapiens; identical to SEQ ID NO: 465

SEQ ID NO: 1163 - protein, 647 aa, Homo sapiens; identical to SEQ ID NO: 466

SEQ ID NO: 1164 - protein, 359 aa, Homo sapiens; identical to SEQ ID NO: 467

SEQ ID NO: 1165 - protein, 277 aa, Homo sapiens; identical to SEQ ID NO: 468

SEQ ID NO: 1166 - protein, 437 aa, Homo sapiens; identical to SEQ ID NO: 469

SEQ ID NO: 1167 - protein, 315 aa, Homo sapiens; identical to SEQ ID NO: 470

SEQ ID NO: 1168 - protein, 770 aa, Homo sapiens; identical to SEQ ID NO: 471

SEQ ID NO: 1169 - protein, 742 aa, Homo sapiens; identical to SEQ ID NO: 472

SEQ ID NO: 1170 - protein, 491 aa, Homo sapiens; identical to SEQ ID NO: 473

SEQ ID NO: 1171 - protein, 308 aa, Homo sapiens; identical to SEQ ID NO: 474

SEQ ID NO: 1172 - protein, 321 aa, Homo sapiens; identical to SEQ ID NO: 475

SEQ ID NO: 1173 - protein, 797 aa, Homo sapiens; identical to SEQ ID NO: 476

SEQ ID NO: 1174 - protein, 425 aa, Homo sapiens; identical to SEQ ID NO: 477

SEQ ID NO: 1175 - protein, 588 aa, Homo sapiens; identical to SEQ ID NO: 479

SEQ ID NO: 1176 - protein, 192 aa, Homo sapiens [sequence omitted]

SEQ ID NO: 1177 - protein, 147 aa, Homo sapiens; identical to SEQ ID NO: 481

SEQ ID NO: 1178 - protein, 711 aa, Homo sapiens; identical to SEQ ID NO: 482

SEQ ID NO: 1179 - protein, 673 aa, Homo sapiens; identical to SEQ ID NO: 483

SEQ ID NO: 1180 - protein, 351 aa, Homo sapiens; identical to SEQ ID NO: 484

SEQ ID NO: 1181 - protein, 570 aa, Homo sapiens; identical to SEQ ID NO: 485

SEQ ID NO: 1182 - protein, 4861 aa, Homo sapiens; identical to SEQ ID NO: 486

SEQ ID NO: 1183 - protein, 433 aa, Homo sapiens; identical to SEQ ID NO: 487

SEQ ID NO: 1184 - protein, 118 aa, Homo sapiens; identical to SEQ ID NO: 488

SEQ ID NO: 1185 - protein, 660 aa, Homo sapiens; identical to SEQ ID NO: 489

SEQ ID NO: 1186 - protein, 961 aa, Homo sapiens; identical to SEQ ID NO: 490

SEQ ID NO: 1187 - protein, 1464 aa, Homo sapiens; identical to SEQ ID NO: 491

SEQ ID NO: 1188 - protein, 338 aa, Homo sapiens; identical to SEQ ID NO: 493

SEQ ID NO: 1189 - protein, 1466 aa, Homo sapiens; identical to SEQ ID NO: 451

SEQ ID NO: 1190 - protein, 142 aa, Homo sapiens; identical to SEQ ID NO: 495

SEQ ID NO: 1191 - protein, 202 aa, Homo sapiens; identical to SEQ ID NO: 496

SEQ ID NO: 1192 - protein, 1806 aa, Homo sapiens; identical to SEQ ID NO: 498

SEQ ID NO: 1193 - protein, 799 aa, Homo sapiens; identical to SEQ ID NO: 499

SEQ ID NO: 1194 - protein, 1496 aa, Homo sapiens; identical to SEQ ID NO: 500

SEQ ID NO: 1195 - protein, 173 aa, Homo sapiens; identical to SEQ ID NO: 502

SEQ ID NO: 1196 - protein, 3176 aa, Homo sapiens; identical to SEQ ID NO: 503

SEQ ID NO: 1197 - protein, 263 aa, Homo sapiens; identical to SEQ ID NO: 504

SEQ ID NO: 1198 - protein, 403 aa, Homo sapiens; identical to SEQ ID NO: 505

SEQ ID NO: 1199 - protein, 300 aa, Homo sapiens; identical to SEQ ID NO: 506

SEQ ID NO: 1200 - protein, 427 aa, Homo sapiens; identical to SEQ ID NO: 507

SEQ ID NO: 1201 - protein, 822 aa, Homo sapiens [sequence omitted]

SEQ ID NO: 1202 - protein, 822 aa, Homo sapiens [sequence omitted]

SEQ ID NO: 1203 - protein, 115 aa, Homo sapiens; identical to SEQ ID NO: 512

SEQ ID NO: 1204 - protein, 170 aa, Homo sapiens; identical to SEQ ID NO: 513

SEQ ID NO: 1205 - protein, 332 aa, Homo sapiens; identical to SEQ ID NO: 421

SEQ ID NO: 1206 - protein, 217 aa, Homo sapiens; identical to SEQ ID NO: 422

SEQ ID NO: 1207 - protein, 764 aa, Homo sapiens; identical to SEQ ID NO: 423

SEQ ID NO: 1208 - protein, 191 aa, Homo sapiens; identical to SEQ ID NO: 517

SEQ ID NO: 1209 - protein, 674 aa, Homo sapiens; identical to SEQ ID NO: 518

SEQ ID NO: 1210 - protein, 418 aa, Homo sapiens; identical to SEQ ID NO: 519

SEQ ID NO: 1211 - protein, 641 aa, Homo sapiens; identical to SEQ ID NO: 520

SEQ ID NO: 1212 - protein, 178 aa, Homo sapiens; identical to SEQ ID NO: 521

SEQ ID NO: 1213 - protein, 93 aa, Homo sapiens; identical to SEQ ID NO: 522

SEQ ID NO: 1214 - protein, 119 aa, Homo sapiens; identical to SEQ ID NO: 523

SEQ ID NO: 1215 - protein, 132 aa, Homo sapiens; identical to SEQ ID NO: 524

SEQ ID NO: 1216 - protein, 181 aa, Homo sapiens; identical to SEQ ID NO: 525

SEQ ID NO: 1217 - protein, 683 aa, Homo sapiens; identical to SEQ ID NO: 526

SEQ ID NO: 1218 - protein, 255 aa, Homo sapiens; identical to SEQ ID NO: 527

SEQ ID NO: 1219 - protein, 781 aa, Homo sapiens; identical to SEQ ID NO: 528

SEQ ID NO: 1220 - protein, 256 aa, Homo sapiens; identical to SEQ ID NO: 529

SEQ ID NO: 1221 - protein, 687 aa, Homo sapiens; identical to SEQ ID NO: 530

SEQ ID NO: 1222 - protein, 168 aa, Homo sapiens; identical to SEQ ID NO: 531

SEQ ID NO: 1223 - protein, 836 aa, Homo sapiens; identical to SEQ ID NO: 532

SEQ ID NO: 1224 - protein, 416 aa, Homo sapiens; identical to SEQ ID NO: 533

SEQ ID NO: 1225 - protein, 169 aa, Homo sapiens; identical to SEQ ID NO: 534

SEQ ID NO: 1226 - protein, 563 aa, Homo sapiens; identical to SEQ ID NO: 535

SEQ ID NO: 1227 - protein, 1104 aa, Homo sapiens; identical to SEQ ID NO: 536

SEQ ID NO: 1228 - protein, 289 aa, Homo sapiens; identical to SEQ ID NO: 537

SEQ ID NO: 1229 - protein, 426 aa, Homo sapiens; identical to SEQ ID NO: 538

SEQ ID NO: 1230 - protein, 533 aa, Homo sapiens; identical to SEQ ID NO: 539

SEQ ID NO: 1231 - protein, 153 aa, Homo sapiens; identical to SEQ ID NO: 540

SEQ ID NO: 1232 - protein, 874 aa, Homo sapiens; identical to SEQ ID NO: 541

SEQ ID NO: 1233 - protein, 261 aa, Homo sapiens; identical to SEQ ID NO: 542

SEQ ID NO: 1234 - protein, 272 aa, Homo sapiens; identical to SEQ ID NO: 543

SEQ ID NO: 1235 - protein, 1129 aa, Homo sapiens; identical to SEQ ID NO: 544

SEQ ID NO: 1236 - protein, 742 aa, Homo sapiens; identical to SEQ ID NO: 545

SEQ ID NO: 1237 - protein, 671 aa, Homo sapiens; identical to SEQ ID NO: 546

SEQ ID NO: 1238 - protein, 155 aa, Homo sapiens; identical to SEQ ID NO: 547

SEQ ID NO: 1239 - protein, 411 aa, Homo sapiens; identical to SEQ ID NO: 548

SEQ ID NO: 1240 - protein, 885 aa, Homo sapiens; identical to SEQ ID NO: 549

SEQ ID NO: 1241 - protein, 491 aa, Homo sapiens; identical to SEQ ID NO: 473

SEQ ID NO: 1242 - protein, 586 aa, Homo sapiens [sequence omitted]

SEQ ID NO: 1243 - protein, 68 aa, Homo sapiens; identical to SEQ ID NO: 552

SEQ ID NO: 1244 - protein, 1194 aa, Homo sapiens; identical to SEQ ID NO: 553

SEQ ID NO: 1245 - protein, 559 aa, Homo sapiens; identical to SEQ ID NO: 554

SEQ ID NO: 1246 - protein, 295 aa, Homo sapiens; identical to SEQ ID NO: 372

SEQ ID NO: 1247 - protein, 245 aa, Homo sapiens; identical to SEQ ID NO: 381

SEQ ID NO: 1248 - protein, 572 aa, Homo sapiens; identical to SEQ ID NO: 399

SEQ ID NO: 1249 - protein, 1237 aa, Homo sapiens; identical to SEQ ID NO: 406

SEQ ID NO: 1250 - protein, 61 aa, Homo sapiens; identical to SEQ ID NO: 410

SEQ ID NO: 1251 - protein, 188 aa, Homo sapiens; identical to SEQ ID NO: 69

SEQ ID NO: 1252 - protein, 578 aa, Homo sapiens; identical to SEQ ID NO: 427

SEQ ID NO: 1253 - protein, 220 aa, Homo sapiens; identical to SEQ ID NO: 87

SEQ ID NO: 1254 - protein, 142 aa, Homo sapiens; identical to SEQ ID NO: 446

SEQ ID NO: 1255 - protein, 211 aa, Homo sapiens; identical to SEQ ID NO: 453

SEQ ID NO: 1256 - protein, 688 aa, Homo sapiens; identical to SEQ ID NO: 99

SEQ ID NO: 1257 - protein, 366 aa, Homo sapiens; identical to SEQ ID NO: 101

SEQ ID NO: 1258 - protein, 201 aa, Homo sapiens; identical to SEQ ID NO: 456

SEQ ID NO: 1259 - protein, 2541 aa, Homo sapiens; identical to SEQ ID NO: 460

SEQ ID NO: 1260 - protein, 362 aa, Homo sapiens [sequence omitted]

SEQ ID NO: 1261 - protein, 734 aa, Homo sapiens; identical to SEQ ID NO: 478

SEQ ID NO: 1262 - protein, 272 aa, Homo sapiens; identical to SEQ ID NO: 492

SEQ ID NO: 1263 - protein, 339 aa, Homo sapiens; identical to SEQ ID NO: 497

SEQ ID NO: 1264 - protein, 398 aa, Homo sapiens; identical to SEQ ID NO: 501

SEQ ID NO: 1265 - protein, 932 aa, Homo sapiens; identical to SEQ ID NO: 509

SEQ ID NO: 1266 - protein, 261 aa, Homo sapiens [sequence omitted]

SEQ ID NO: 1267 - protein, 366 aa, Homo sapiens; identical to SEQ ID NO: 101

SEQ ID NO: 1268 - protein, 365 aa, Homo sapiens; identical to SEQ ID NO: 179

SEQ ID NO: 1269 - protein, 137 aa, Homo sapiens; identical to SEQ ID NO: 187

SEQ ID NO: 1270 - DNA, 4785 bp, Homo sapiens
tgcctgtcagggtgttgtgggggtgcccagctgcctgtcagaccctgaggactaccagacagagagtgggcagccatttcccgggaggcttccccttcccccacctcactctcttgccatacgggggtcaggagtcacgtgtagccacagcgctctgggccaggggtcggggctctggtgtggctcccccaggccctggctgtatgtgggtgggcatgtggcctccccccaccctgtgtgttaggaactcgtgtcctgtcccggagtgtctgtctctgtttcacttcttgtgttcccgtgtctgtctgtcttgcatccctagcccgcagtctttttctctgtccctttatctttctgtttttgtctgtgtcctaggtcggtttctgccactggctctcctgtccctgtgatctgggtctctgtgtggtctccgctggcagggggaggggagtgtgaggaaacagaactaaaagtgctgggctgtgtgggtcggggctgtgtggacagagggggcgtggcagccccgggtgggtgtgatctgtggcttgaagggaaggatgacgctgagtgggtctcgggggcaggaggagcccccaccgagccgagtcccacgggccgtgcgcgtggccagtctgctgagcgagggagaggaactgtctggggacgaccaaggggatgaggaagaggatgaccacgcctatgagggcgtccccaatggcggatggcataccagcagcctgagcttgtccttgcccagcacaatagctgcgccacaccccatggacgggccgcctgggggctccacccccgtcacaccagtcatcaaggctggctggctggacaagaacccaccgcagggatcttacatctatcagaaacgatgggtgagactggatactgatcacctgcgatactttgacagtaacaaggacgcttactctaagcgctttatctctgtggcctgcatctcccacgtggctgccatcggggaccagaagtttgaagtgatcacaaacaaccgaacctttgccttccgggcagagagtgatgtggagcggaaggagtggatgcaggccctgcagcaggccatggctgagcagcgtgcccgggcccggctctctagcgcttatctgctgggagttccaggctcagagcagcctgaccgcgctggcagcctggagcttcgtggcttcaagaataagctgtacgtggccgtggtcggggacaaagtgcagctctacaagaatctagaggagtaccacctgggcattggcatcaccttcatcgacatgagcgtgggcaacgtgaaggaagtggaccggcgcagcttcgacctcaccacgccctaccgcatcttcagcttctctgctgactcagagctagagaaggagcagtggttggaggccatgcagggagccatcgctgaggccctgtctacctcggaggtggccgagcgcatctgggctgcagcccccaacaggttctgtgctgactgcggggctcctcagcctgactgggcctccatcaacctctgtgttgttatctgcaagcgctgtgcaggggagcaccgtggcctgggcgctggcgtctccaaggtgcggagcctgaagatggacaggaaggtgtggacagaaacacttatcgagctcttcttacagctggggaatggcgctgggaaccgcttctgggcagccaacgtgccccccagtgaggccctgcagcccagcagcagccccagcacccggcggtgccacctggaggccaagtaccgtgagggcaagtaccgccgctaccacccgctctttggcaaccaggaggagctggacaaggccctgtgtgctgcagtcaccaccacagacctggctgagacccaggcgctcctgggctgtggggctgggatcaactgcttctcgggggaccctgaggcccccacgcccctggctcttgcagagcaggcggggcagacgctgcagatggaattccttcggaacaaccggaccacagaggtgcctcggctggactcgatgaagcccctggaaaagcactactcagttgtcctgccgaccgtgagccacagtggcttcctctacaagactgcctctgccggcaagctgctacaggaccgccgggcccgggaagagttcagccggcgctggtgtgtccttggtgacggggtcctgagctactttgagaatgagcgggcagtgacccccaatggagagattcgggccagcgagattgtgtgcctggcagtgccccctcctgacacccatggctttgagcacacctttgaggtgtacacggagggagaacggctgtacctgtttgggctggagagtgcggagcaggctcatgagtgggtcaagtgtattgctaaggcattcgtgcctcccctagccgaggatctgctggcccgggattttgagcggctgggacgcctaccctacaaagctggcctgagcctacagcgggcccaggagggctggttctctctcagtggctcggagctccgtgctgtcttcccggaggggccctgcgaagagccgctgcaactacggaaactgcaggagctttccatccagggggacagtgagaaccaggtgctggtgctggtggagcgaaggaggacactgtacatacagggcgagcggcggctggacttcatgggttggctgggggccatccagaaagcagccgccagcatgggggacacgctgtcggagcagcagcttggggactcggatatcccggtgatcgtgtaccgctgtgtggactacatcacgcagtgcggcctgacctccgagggcatctaccgcaagtgtgggcagacatcgaagacacagcggctgctggagagcctgcggcaggatgcgcgctctgtgcacctcaaggagggcgagcagcacgtggatgatgtttcctcggcgctcaagcgcttcctgcgcgacctgcctgatgggctcttcactcgcgcccagcgcctaacctggctggaggcctcagagattgaggacgaggaggagaaggtctccaggtaccgagagctgctggtgcggctgccccctgtcaaccgggccacagtgaaggcccttatcagccacctgtactgtgttcagtgcttctcagacacgaaccagatgaacgtgcacaacctggcaattgtgtttgggcccacgctcttccagacagatgggcaggactacaaggctggccgtgtggtggaagacctcattaaccactatgtggtggtgtttagtgtggatgaggaagagctcaggaagcagcgggaggagatcactgccattgtgaagatgcgcgtggctggcactgccagtgggacccagcatgccggtgacttcatctgcacagtgtatctggaagagaagaaggcagagactgagcagcatatcaaggtcccagcatccatgactgctgaggagctcaccctggagatcctggatcgccggaacgtgggcatcagggagaaggactattggacctgctttgaggtcaacgagagggaggaggcagagcgccccctgcactttgcggagaaggtgctgcccatcctgcacgggctgggcacggacagccacctggtggtgaagaagcaccaggccatggaggccatgctgctgtacctggccagccgtgtcggtgacaccaagcatggcatgatgaagttccgtgaggaccgcagcctcctgggcctgggcctgccctcaggtggcttccacgatcgctacttcatcctcaacagcagctgcttgcggctctacaaggaggtccggagccagaggccgtggagcggggcccctgagaccagtcaccggcctgagaaggagtggcctattaagagtctcaaagtctacctgggagtgaagaagaaactcaggccacccacctgctggggcttcacagtggtgcatgagacagagaaacatgagaagcagcagtggtacctctgctgtgacacacagatggagctccgggagtggttcgctacctttctgtttgtgcagcatgacggcctggtgtggccctcagagccctcacgcgtgtcccgggcagtgcctgaggtccggctgggtagtgtgtcactgatcccccttcgaggtagtgaaaatgaaatgcgccggagtgtggctgccttcaccgcggaccctctgtctcttctgcgcaacgtctgagcacaggagcccatccttggctctaggattccgccgctggaagccttctgttcagacaccccttatgctccaaggcctgatgtgagccagcggggggtgcatgggaaactgcaccccacaacccacatcctccatcctgactgcagcatggggttccccggcaggggtgggaggcagcaggggtcagcctgggcaggaacctctcccaactctgtccaggtgttcagacctcttggcccaacctgctcaccccaccgggttcactgtccttgtggggctggagagatgggcataagtcaggaacttgggaggaccaccaccctttcagaggcgtgaggccctggggccctgccggaagggagccccctgctcctcccaacaaactccagaacagcagaaagcgggtgctgtagaggagcactcagctcacggggagggagctcttggctgagcttctacagggctgagagctgcgctttggggacttcagccttccttccagtctgggctgagtggggggtccagactacctgatgccccttccccaatttggggactttttgataatataaatatatctgtatattttacccta

SEQ ID NO: 1271 - DNA, 1960 bp, Homo sapiens
  misc_feature 1911: n = A,T,C or G
ctccgccttcattttggccaacactggtcccatcacaaactactacacagtctcaaagacaattgggcgtggcacctggggagaagtgaagctggtcattgacaacgggaccggagcgcgtcgcgcggcgaagaagattcccaagtgttacgttgaagacgccgaccgttttcgtcaggaaatcgagatcatgaagagcctcgaccacccaaacattgtgcggctctacgagactttcgaggatatgacggacttctacctggtgatggagtactgcactgggggcgagctctttgatcgcttggttcaccagggtgtcttcacagaggctctggcctgccgcatcatgcggcagattctcgcagctgttgcttattgccatgcccaccgcgtcgcccaccgagacctgaagccggagaacttcctgtttttgcatgacaaccccgaatctcccatcaagctcatcgacttcggcctcgccgctcgtttcaagcctggacagcccatgaggacgagagccgggacgccttactatgtatcgccgcaggtgctggagggacggtacggcccagagtgcgacgtctggtccgccggagtcatgatgtacattctgctttgtgggtatcctccgttcaatgcgccgtcggacagggcgattatgaacaaagtgcgtgcgggacattacaccttcccagacagcgaatggagtcgagtgtcactacaggccaaggatctcatctcgcgtcttcttgatcgccatccgcgcactcgaatcagtgccgagcaagcgcttcgacacgcctggttcgccatgcatgctccgggagaccattttgagcctctaggcttggacattttgagcaaatttcggcgattccagggcttgagtcgactgaagaagctggctctgacggttattgcacagcatttggaggactcggaaatcgaaggtctcaagaacttgttcactcagctcgacaccgagggtgacggtgtcctgacagtggaggaaattcgcaagggcatcgagcggagcggcgtccacttacctccggacatggtcctcgaagatgtcttgagggaagtggacaccgctggcactggaagcattgattacacagagttcattgcagcttgcctccaccagtcccactacatccgagaggaggcgtgtcgagctgctttccgcgtgctagatatcaatggagacggcctcgtcagtgctcaagaactgcgccaggtgttccacatggctggtgatttggagacagacgcggcggcggagttgctggaggcagacgcggatggtgacgggcacatcactttcgatgagttttgcggactcatgcggaaggtgccttcgctcgccttggtcacggagcacacagtgtcgatgatgcggcgaacgtgttcgcgcacaaacatcagcgaagccagtctgacgcctcgcgctacggggtaaatcgcctcgtgccgaattcggcacgagccgaagagctctcccagcacagccaacgcatccagcaaagcctgcttcgccgtgccgtgaaaagcccggggaaactggtggagttagacaccggggtcgcttctccagtgttcgcaaggtcgttcggcttcgttcccgttgttcccggattgatgtgggaagagtccgaagttgggccaaacgttggggtaacctttgttcacattctaaagccggaagttactccgtacggcaacctgaacaacaacgtcatgatgtacaccgtggccccttctggagctgcgccggacaagacgtattcactggcttataagacaacgattgccggcgtcattggagctgctgcggcatacaacgacactccggctgggcagcagtacccagtgcaagggctttgtcttcccttgttaggaggcgggatnttcaggagaaaccgcagccttgagtccattggcagggccaacgcagagg

SEQ ID NO: 1272 - DNA, 1194 bp, Homo sapiens
ttcttttcctctcttcttctttcgcggttcagcatgcaggaaaaagacgcctcctcacaaggtttcctgccacacttccaacatttcgccacgcaggcgatccatgtgggccaggatccggagcaatggacctccagggctgtagtgccccccatctcactgtccaccacgttcaagcaaggggcgcctggccagcactcgggttttgaatatagccgttctggaaatcccactaggaattgccttgaaaaagcagtggcagcactggatggggctaagtactgtttggcctttgcttcaggtttagcagccactgtaactattacccatcttttaaaagcaggagaccaaattatttgtatggatgatgtgtatggaggtacaaacaggtacttcaggcaagtggcatctgaatttggattaaagatttcttttgttgattgttccaaaatcaaattactagaggcagcaattacaccagaaaccaagcgccctttggctctgggagctgatatttctatgtattctgcaacaaaatacatgaatggccacagtgatgttgtaatgggcctggtgtctgttaattgtgaaagccttcataatagacttcgtttcttgcaaaactctcttggagcagttccatctcctattgattgttacctctgcaatcgaggtctgaagactctacatgtccgaatggaaaagcatttcaaaaacggaatggcagttgcccagttcctggaatctaatccttgggtagaaaaggttatttatcctgggctgccctctcatccacagcatgagttggtgaagcgtcagtgtacaggttgtacagggatggtcaccttttatattaagggcactcttcagcatgctgagattttcctcaagaacctaaagctatttactctggccgagagcttgggaggattcgaaagccttgctgagcttccggcaatcatgactcatgcatcagttcttaagaatgacagagatgtccttggaattagtgacacactgattcgactttctgtgggcttagaggatgaggaagacctactggaagatctagatcaagctttgaaggcagcacaccctccaagtggaattcacagctagtattccagagctgctattagaagctgcttcctgtgaagatcaatcttcctgagtaattaatggaccaacaatgag

SEQ ID NO: 1273 - DNA, 1474 bp, Homo sapiens
ccggggcacgttccaggagctgcctagggctgaggttccaggcctgggggtcgcttccagctgccagatcccgtgcagtcctggggaccctgagaagcaccgagccatccctgacccaggaactttccgcagactcgccgccatctgggagtgaagcaacatggatgcagtcagccaagtccccatggaagtcgtgcttcccaagcacatcctggatatctgggttattgtcctcatcatcctggccaccattgtcatcatgacctcgttgttgctgtgcccagccactgcagtaatcatctatcgcatgcggactcatccgatccttagtggggctgtttgagagcctcccaagagggccgggtgagggatgaggacaggcatcctatccccagcctcttcctgtcttcagaaaagcagcaggagggactttggggcatggacctgagttctggttttgattctgccacgagccagctgtgtgaatttggtcaagggacctaactctctgagttccaggttccttatctttcaaatggggatggtgatccctgccctttctacctcatagggatgtgagaaccacctgacttagtggatgtgaaagctgtttgtgatcagtaaagctaccacagatataagggtgttatgctgaatcctgagaagctttcaagaaccagagaacctgattgctgatgatggccttaaaggtggtgagggagatactgggggcagagcagactttgccagtgcccctcaggtcaaaccaagccaagagcaccctgtccccattccaaggggccagcagcactttggcccaaagtattttctttaaggtgccattccttcatgttttctcagtttggagggtgatgggtagagctttccagaaccttctccattccagaatctctgcccctgtgtaatctgaaggaaggctgtgccatctttgggcactgccaagggagttggggtgatgggcttctttctgcactggagtctcacatctgttagctttgacactcaagcaatgttggaaaatgcagggtgactgagttccctgcccagctttcgggatctctggcccccatccccttgtgtgtgtccctctgcccagctcctgctgtaattagctccacgtgtacccccttcactccctcccaccagctctgcagccagcctatggcaattatattttaagaggtgttcccaggacttttgggacctactaaaacaatgatggttattttagatgtgatgatttatatttatgtagagatatttctggaccactcaagctcttcgataccaaaatcaggagcatcttgggatttattaaattatgtaagaagatagcacagatatcgggatattattgtgtgaaaatgctgcttttactttgatgtgatctcattgatgtacacaaccaagttccaataaagtgctagaatgtgaaaaaaaaaaaaaaaaaaaa

SEQ ID NO: 1274 - DNA, 1229 bp, Homo sapiens
cccacgcgtccggggccggcgcacgaaacctgtttggaggttatggatgataaacccaatcctgaagccctaagtgacagttcagagcgtcttttctcctttggcgtcatcgcagatgttcaatttgcagacttagaagatggctttaatttccaaggaaccaggcggcgatactacagacatagtcttcttcacttacagggtgccattgaagactggaataatgaaagcagcatgccctgttgtgtccttcagcttggagatatcatcgatggatataatgcacagtataatgcatccaaaaagtccctagaacttgttatggacatgttcaagaggcttaaagttccagttcatcatacatggggaaaccatgaattctataacttcagtagagagtatttaacacactctaaacttaacactaagtttctagaagatcagattgtacatcatcctgagaccatgccttcagaagattattatgcttatcattttgtaccattccctaaattccggttcattttacttgatgcatatgacttgagtgtcttgggcgtggatcagtcttctccaaaatacgagcagtgtatgaagatattgagggagcacaatccaaatacggaactgaatagtcctcaaggtgaattattcctttgagctgagaatctaatagattgtctttaaattcttcagctaccttttattcagcaggaagatggacaattaaggactttctgagccccagtttgtccagtttaatggaggattcagccaagaacagctaaactggttgaatgaagtgctaacattctctgacacaaaccaagaaaaggtggtgattgccatcttcccatttacccggacgcctctgacaatgtgtgcctggcctggaactacagagatgccctggcagtcatttggtctcatgagtgtgtggtgtgtttctttgctggtcacacccatgatggtggctactctgaggatccttttggtgtataccacgtcaacctagaaggagttattgaaacagctccagacagccaagcctttggcacagttcatgtctatcctgacaaaatgatgttgaaagggagaggcagagttccagatagaattatgaattacaagaaaggaagagccttccattgttagtctaatttattttaacttgatagaaaatgagctttgtgtttgtccctcctaaacaaaaaaataaaaatcctctg

SEQ ID NO: 1275 - DNA, 4149 bp, Homo sapiens
ggaggcgacggtggagacggctgccctagtgggagaggcggcggcggcggccgaggaggaggagggggaagcggcggcggcaaaggaaaatgcttggacagaagagatgagtactatttccactaaggcctagaattgcctactgtacaaatagtcctgatcaggcaatatacgaatggcccaaggaagccaccaaattgattttcaggttttacatgacctgcgacaaaaattccctgaagtacctgaagttgttgtatccaggtgcatgttacagaataataataacctggatgcctgctgtgctgttctctctcaggagagtacaagatatctttatggtgaaggagacttgaatttttcagatgattctggaatttctggtctacgcaatcacatgacttctctcaacttggacttgcaatcacagaacatttaccaccatggaagagaaggaagtaggatgaatggaagtaggactctaacgcacagcattagtgatggacaacttcaaggtggccagtccaatagtgaactatttcagcaggagccacagacagcaccagctcaagttcctcaaggctttaatgtttttggaatgtccagttcctctggtgcttcaaattcagcaccacatcttggatttcacttaggcagcaaaggaacatctagcctttctcaacaaactcccagatttaatcccattatggtaactttagccccaaatatccagactggtcgtaatactcctacatctttgcacatacatggtgtacctccacctgtacttaacagtccacagggaaattctatctatattaggccttacattacaactcctggtggtacaactcgacagacacaacagcattctggctgggtatctcagtttaatcccatgaaccctcagcaagtttatcagccttcacagcctggtccctggactacttgtcctgcatctaatcctctgtcacatacctcatctcaacagccaaatcagcaaggccaccagacctctcatgtctacatgccaatcagttcacctactacttcacaaccaccaaccattcattcatctggtagctcacagtcttctgcccatagccaatataacattcagaatatttcaacaggacctcgaaaaaaccagattgaaatcaaacttgaacccccacaaagaaataattcttcaaaactgcgttcttctggacctcgaacctccagcacttcctcttcagtcaatagccagaccttaaacagaaatcagcccactgtttacatagctgccagccccccaaatacggatgagctgatgtcccgtagtcaacctaaggtctatatttcagcgaatgctgccacaggagatgaacaggtcatgcggaatcagcccacactcttcatatccacaaactctggagcatctgctgcctccaggaacatgtctgggcaagtgagcatgggtcctgcctttattcatcaccatcctcccaaaagtcgagcaataggcaataactctgcaacctctcctcgagtggtagtcactcagcccaatacgaaatacactttcaaaattacagtctctcccaataagccccctgcagtttcaccaggggtggtgtcccctacctttgaacttacaaatcttcttaatcatcctgatcattatgtagaaaccgagaatattcagcacctcacggaccctacattagcacatgtggatagaataagtgaaacacggaaactgagtatgggatctgatgatgctgcctacacacaagctcttttggtacaccagaaggccagaatggaacgacttcaaagagaacttgagattcaaaagaaaaagctggataaattaaaatctgaggttaatgaaatggaaaataatctaactcgaaggcgcctgaaaagatcaaattctatatcccagataccttcccttgaagaaatgcagcagctgagaagttgtaatagacaactccagattgacattgactgcttaaccaaagaaattgatctttttcaagcccgaggaccacattttaaccccagcgctattcataacttttatgacaatattggatttgtaggtcctgtgccaccaaaacccaaagatcaaaggtccatcatcaaaacaccaaagactcaagacacagaagatgatgagggagctcagtggaattgtaccgcctgtacttttttgaaccatccagccttaattcgctgtgaacagtgtgagatgccaaggcatttctgagccaaatggccctgtatcttctctaaaaccacatctaaagttcaagaaactagtctgtcatcgggaaaaagtttcactgctacataggattttgtcaaattgaaggtgtgacaagatggtgttctgctaatgttaaatgtcagcccacagagctaataatacctcagtataatgtcatgagcagttgaaattcatcacatgaaaagtaatctgctgaaagacttggttgcccactgcctaactgtgtacagtgttaccagtgtcccattatggataattctcaatatgttaacacctaggtgttcccaatacctttttcccctcatgtcactactgaattttgacaggaggaaggaatagaatgatagcttgttttatttgtaaagctttcagtgaaacactacatacacgaagaaaaggaacaaggtttaactatttaagaaccatttgctgccgcatagtgccattggatagggaagaacttcagaaatctgtggtactcttggccttgtctttgtcttccctgaacgtgtctccactctgtgaagccagcatctaggggctaaagatgcaaaggaaagcagcatgcattgtctgtacaaatgtgcagcgaaataccccaaagcttttcctactgtacagatctctcgagtctgctttaagtgatttcttttcttcttgattattttcttatatttctatatgtatagtgtaatagccttttgttaactaattttcttttttccttttagtaattaagcacgatcatgtccctttttaagccttacctgagaggaacaatgccttaaaataaaaaagcattaatgagatgaaagtatgcacagaataactttcctctacttattctgtactttgccctcatgagttccaatgttgtgtgaagacaggcagatgctgcacagtgaattgcagatgatattacagaagtgatgtctgtaggtcacattaaatactgacttgagcagtgggtgacacaacacagtgtttgtcttccacagggaagcttaaaacaaaagatatttttaacccactgacagaacaacaaggttaagcttcatctgcttggtgtcccacagaacttgcacaagcagttgttattgggaaagtacagtctcaaaaccagcaacagcagcagtacctacagccctttttttggagagaagtttaaatgctttactgttggggcagtccatttctaatcctgacttggtgacagtatcatgtgtatttataaaacaaggctagccatatttaggacaactgaagaaaagctggaaaaaaaaacaagcaaacttgaacactgaagcaacctcaagcatctctttattttgatgatatatttttgtaaggaaaatattcagatgatcaggaatgtatataactgaaatcaagaaaaagaacagtatgcatttaaaaagacagaattatgaaattatatgagtgcttagaatggggctaagggaagtgctgaaatagagcaaaggatggaagataatatagactaccacccactgtaaatgtttgcaagtggctgtgttttaaatgggattattacagttgatctctatgaatgtcagagccctaactttcaggctttgcattttgtatatgggaagaaatatgacaatcctaggtaattaaaccatagacccaaagcccttacgtttgatgcaatttatttttaaaataggccttgtttttcagcttcatctgcagttctatgtgaagattgataaatcagtttttacttgttttattaataaaacgtaatttggatatcttgagttgatggttttgtgatttagctgggtaaactatctttgtaacagataagttatttataaaaattaaaaaacttatattctaatgtg

SEQ ID NO: 1276 - DNA, 1457 bp, Homo sapiens; identical to SEQ ID NO: 270

SEQ ID NO: 1277 - DNA, 177900 bp, Homo sapiens
aaaacctgggcaatttaaaatagcaaaagaaacctttaaattaaaaaatatatattgtttagagacagggcccccaggctggagagcagtggtgtgatcatggctcactgtagccttgaactcctgggctcaagtgatcctcctgcctcagtctcccaagtagctgggattacctcttaaaatgagttttggccaggcatggtggctcatgcctgtaatcccagcactttgggaggccgaggcgggtggatcacaaggtcagaagatcgagaccatcctggacaacatgatgaaacctcttctctactaaaaaatacaaaaattagctgggtgtggtggtgcctgcctgtaatcccagctactcaggaggctgagacatgagaatcgcttgaatccaggaggcggaggttgcagtgagccgagatcttgccactgcactccagtctgggcgacagagcaaaactgtttaaaaaaaaaagggggttttaacatgttgcagccagccccaaggttacaaatcctgggctaagggaaattaggatctaataagtttactctgtgaaaatatttctctgaaaaatgagtgatacattaatacgacactgtgcaataactatgaaggcaaacggccctaattgctttctttcctgcctggggtttttcaaggttccccccggctttgggtaagggagctctctcagggcttgatggctttacctttgtcgtgtgcttcttgcccagtgtccccacacaacgttgcgcttctccgtggctgcatttagactttaccgtaaatgtgagtttcactgctcacacattgccccccatattatcttccccagagagcaggaggcacccagtattcccacctccttacaacagtgccttgcacagaacaggccctgcgcggatgaaacttagcaaggagagagattcttcctgttgtatcaatataagaaacgggttccaggcctgcctgaatgagttccatacacaatgcattaatataattgttcatagttcctttcaacggcctcttaacaagttcccaaaatgagtattatcagtataatttaaaaagttaacacaaggaggagagatggctgacaataaaatagttatgtacttgatgacaatctgtaatagcttcaggtcggaaacaagtacctttccttttcttgaaacaaagttccagtctctggaacataaaaccgggaaatacatcaactttggggaacaggagaaaaactgtatttattctaaccgaagtactcctctcactttcaggcgtccagcgtctccagagcctctacaagtgcctccatcaaaccagcttttgggaaagaatctgttaagcccattcagctaagcggcacggggtcacagggctttgagtagccttcctcggtgacgctgagtagggaactccgggatggggctccacggtggactctcggggacaggcacccggggccaccctacaaagcctcgccctccaggccacagtccagagccttcggcctgcgcagggtcctcgctgcatccagcggacggtactgagaagccatgcgctggcggtttgatgcaacacgaccctcagggccgacccagcgagtgaccaaacatagcatgtttttgttttgcatctctcgtttgtcccgtttcgcctcgggggtgtgatggcgccgcccacctccccaccccgcccattccaaagggactctcccagctaccggaatcagccgcgattcgaggccgggcgggggcgacagccatagtccgacgagcgacctggaccccgcgccaagcccgccccagcctcgatgggactcgcgaggggccgcggggactcggcggcgccgggatcgtgggaggagacgggagggtcccgacgcccgccaccggtcacatcctcggccccaaaccccggcctggctcctaaggacctgggtcggccgccctagccctaaggccactcacctctgccaggccgctgagccgccgcgcgttgccgggacaacggcgcgccaggaacgcggaaatagccgaaggtgagcgaggcggccccgaggactcccgaagcgccccgagcggccggaaagagccgaaggcgatcgggcacgcacgtgcagctccgaggcccgagcgtcgggggccaggttattccgctctgcaagagagaagcgggacgagctttttctaggagagacggcggcgcagggccggcgtctgggtcccctttgtgtggagggcgcgctgtcacagccccgatcaaccgcggcatcctcccctcctgggcgtgttcccttcccgtgcatcccgaggcggagcctttccagcacgcggcggtctcggcccaggccttccctgggctccgcttttctagtttcggagcggagggcgtgggtcaagcgtttctgggaaagtcgatgcgctcggcagtgtcctgaggtgttgggtgactgagggcctgttccatcgccgggccccggactccacagagccaagcgaggcagggagcgcccccaagaaagcagctggcggccggacgcggggctcgcgcttgggcttccagctcttgggggctggggcgggcggatcgttggagcccaggagttcgagaccagccttggcaacaaggcgagatcctgtctctaaaaaattacaaaaattagccgggcgcggtggcgcctctagtctcggctacaggaggctgagggaggagaatcgcctgagccccgggaggcggagactgcagcgagccgagatcgggccactgcactccagcctgggcgacagagcgagtcaaaaaaaaaaaaaaagaaaagaaaaagaaacactggaatttgagccgggcgcggtggctcacgcctgcaaacccagtactttgggaggctgagacgagcggatcacttgaggtcaggagttcgagactagcttggccaacatggtgaaaccccgtatgtactaaaaacacacaaattagcgagtatggtggcgcgcgcctgtaattccaactactcgggaggctgaggcaggagaatcgcttgaacctgggaggcggagcttgcagtgagccaagattgcgccactgcactccagcctgggcgacagagcgaaactccgtctcaaaaaaaaaaaaaaagaaagaaagaaacactggaatttgaaaaacacccctctgctttcttgctatgaagaaaatgaccaagtgcccagcgccgctcggctacgctaacgtagcgcagaagcacatactccacccaggaaagggtgcgcttaactgcctcagacgtgcttccacacttctcagaactcaggttcgcgcccgattccacactccgagctaccacgccgttttcttctcacgtatccgtcaacactgctgcggccaatcacagcacgggccctggcctattggctgtctgtccaccaatccaaagagacgcacagtccgcaaggtcgcgaggctggcgtcacaacactactggcgccgcgggctcgcccccgacgcccaccgggctcgtacgtgcgagcgcgcccgcccagcgctagccaatgggagcgccgttttggggagacgggcccgaagaaacattgggggtgctcgcccccgcgttcgtcgccccgccccggcgcccgcgcaccccggccccgcccccgcgcgccgtccgtgaggtccccaccggccgccgtagccggaactgctgctgagggcggcgggccggcttcgctagggtgagtggcggcagtatctgcgtccgcagcccccgcagccgcgcgccggcccgcggaggggacgtgccggggctagcgccgctcgaccagtcgcttccgaggcggacgaccagcccggcgttgcggcctccctgcagccggcgctcgggggccggggctgcccggcccggctggttctgcgggcacccggggaggccccgggaagccaggctgccgcccggcgttgatgaaaaaggtgaccaaggctgggcggcggggctgtcatggcgaggcccggccggggggtcctgtcgggcggcgcgggagagcgcggggggggcgtcgcttccacagcgcccggtacagccacaactggcctcagggcgaggaggcttctgcgtccccatcccgagacgcgagccggtgcggagcgggacggggctggaggagactgcgcctccgagaaaagtccggtctcgttggaggttctcgcgaaaaggaggccatccccctgcttgttggcccttagggtaaagtctggacggcgtcggtcctttcagtggcgaaaagcgcttccccgtgctcggtcggcgtcttgggtgtggagcccggcgagcgggcgagttcactctggtggccgagtttgttttgcttgggtcccgggtggcctgcgggcggacaggtccctgggcagcggggttctcagcccgagacgaggtctttgggggtttaggtttcttgagtggaaagaggtgggttgagggggaagagtgggaagtcttgccacgaaatcccttaagttggggtgtttgtcgtgggtggttttgttctttggcagagttttttttaaaactagcatgaactcgagattccctagaccaattccgacaggagaaaacggccacggatccttgtgtgatctgcacctcagggtgggggcatcattgcgactttgaagccatttcccgatctctcggaaagagaggtcctcgcccgcgtccctgtatttcgtggttggtgttggtgcctcgatcgtgtgttcctttgaagtggaaatgcccccgttctcaacagttgagttgaacgcagggtcagtatctgctgaggaatctaatcttcagcgtttttgcttcctcacacgtgcccgtcccggactgtttctgggctgcagctcttgctgtgtacctgattgtctgagtttatttttgagtggctctgctttctgggctgcagcatttttagtcactgcactttgttgttgacattttacagggcggtgggtagcaaagttgatgcaataattttattaattgttgccaagagttttaacaccattgtcttctaccgcttcttgcacctggacccggacataactgggctgtcactttcccgggtggttccaacctgttccatgcaacaggctcctttgttgcaaaagcatttttaactagtaaatccccgcagcagctcacatttcccaccctgggaagaagattcccagagacccggagctgattattctttatgtgtgttttaaaataagcaggcgggccggcggcattgggccaccatggagttccccgtgcgggcaggcgagcccgcgcttctcccgtcccggggtggatccggcctcctctgtcctcctccagggccagctctgggggccggcgcgtggggcaggtgcgcggggcccgggagccccgcgcctttcggggggcggggagggggtgggacgaggggctagggctggggctgcggcccggccggccgaggcggcgcagggagcgaggccggcgcgcagggccaggccatgagccgcggccccgccgggtaggtggctgtgggcggggcagcggcccggacccgcaaccgtgcccagacccgcgcccgcgccggggctcccatagaccccggggccggggccggggccggggccgggcagggtccgccgagctgtcgcgccctcccgccgccggcccgggcgtctggacgcgagcctcggccagggggcgtccggggaggcccgggagggtcccgggctggtgggcagggccgggggcggcggcgtgggggcggcaggggccgcggcgggctcgggcgggctcgggcgggccgggccgagccgccgagaggggatttggaacaaacaacggcggccatgttgagagcgcgtcggggccgctaaacttcccggcctgcgcccgcctcaccggccgcctcccctctcccggccgcaggatgacagtgaagttgggcgacggcggcagcggggaggacgggctcaagaagctgggcaagcgggcggccgatgaggagtccctggaaggagaaggggccggcggcgcagacgcggccgaggagagcagcggcacaaagagggacgagaagaccccccgggccggcgccgacggcccccccgcgccccccggcgcgccgcaggcgccgtccccgccgcagggcagcccccaggaccagcaccacttcctccggtccagcgtgcggccgcagagcaagaggcccaggaaggatcctccgagcgctgtggggagcggcaacgccggtggctcggggccccgcggaaaaggtagggcggcccgtccccttgggagaccccagcccctctccggggtgtgccgcgggggagaggaacccctcgccccagccgggctccaccctagctcacccatcccgcggcctacactgaggctctcaatttgggtggcacttatggggcatgtgtcccctctctccttcgaagaggctgcgactttctatatttaaactctttgaagaggcagtgagtatccttttttgggggggagtcgaagagatcccttaaagctgtttcctttccaaaggatcactgatggttttctatggttttgtgtttcaaacagcggacaatagttcggaaacgggaagagaaaaaaatacctgctgtatctctttcccagacatcaggcggtggaaatgcaccaagggagcaggcttttgaaactcattggggggaagatgggtaagaagcggagaaaggatccttggggtctgacttggacccattgtcctctccttcaagtgctcctgggttgagagtaggaagggcatagagatggggccctttgagttgcaactggggtttacttctgtgccaaagaaaggaaagagtggtgaaaacgattgacatgaacaagcagcagcttgtagtgttcgcccttgtattctgaggtgatggagaatgttgctacttagctggggtctcttaccaagatagtaagaaaacggcatgttagtttcgttctccatgtgccagtgcttcattgttgtctgctcttatttctatttcagtcttgtgcttttccttacgcaggtgaatgactctgattctttttgtttccgaccatgttcgcagcactttgtataaatagcaaatataacatcagcttccagtgagtttcacgtgaaaaaaaaatctttcacttccttccttgggaaatgctcgtttacatttagtgaatggtcctggtagttttgacaaggaaatatattacgaactaatggagaacctgctttggagatctgtgccacatgtgttccattaagcccacttctcctgccgcattctcaaccgaagaaggctggcctccggaatcatggccttactcattggtaaagaattctgatataagtatacttatttaaagatgtaaatagaaggtaacttagcatgtttcagaatttaaaacttgcctcatatgaatttattttgatgtgaaagttgctgatcaatttggaaaacatgagtggctttgcttgttactagttttttattgctagttacaggtatgtctaagctcatataagctccatggttccttcaaaggtttgttgttcatggttcagaagccctggaccttgaatccagccggcattcgtcccccatgtccctggcctccaaccttgctctgccccttcaccctcttggagatgcttttctgtcgggtgtcctcacctgtgaggcaaggaatgagagcagctacttcaccccgttgaagtgcggctgctaaaatgaaatagtgcattggtgtgaaagcactctcagacgtgtacgtggctacttgtatgtataagtgaagtgctgctgagacgttagtgatcaggtcaatttttggcagttgggacgaggggaggcttgcttttgtttgtatagttgagagtggcttgctaaggtgcagaaggtttcctgagcttggctcacacttaggttgctggcacttctttctttgcttcttgtcccattgtgtggcttggagaagcgtgggacttttcattaagttttaatattaataaaatgcaaatttattagaatttgtgctcctcgtgacatatccattatcccactttagcaagcaaatatatcttttttttttttttgagactgagtctcactctgtcacccaggctggagtgcagtggtgcgatctcagctcattgcaagctctgcctcccaggttcacaccattctcttgcctcagcctcccaggtggctgggactacaggcgcctgccaccacacccagctaatttttttttttttttggtatttttagttgagacggggtttcaccgtgttagccaggatggtctcgatctcctgaccttgtgatcctcccgcctcagccccccaaagtgctgggattacaggcatgagccaccgctcctggccacaagcaaatatatctttaagcaaataataagctaagctgtgatggtggcttttaggagaggagtaggaagtgggtctcctttgcatcacagaacttctcggccactgtctgccttggagcttcccgggaaggaaggctgcctgtccgctgctctctgctttcaggttcctcagtgctttgggaggcacttcactgtgcccaggacatcctctgacaccagtctttggagagacctctgctcagtcgttgcttccattacccgtcagaaaagaaggccaggtggtggcagttgccccgcaacagtctttagctcaccttccagaaagatgctcagaggagaatcctcttacattctggagaaatctgcatctggagtggtgagcatctgtcagggaggaaacgatcaatacttcatgtttcaatttttcacttggaaatgatgtaacttctattatgcctaaggaatacttagctcaatcactggcagttcctttggttgattacttactgccctggccagtttcaatctcagtgggcctgagactcttacagtgaatttggaagaaaggacttgtggagaaaaggaaagtctgcttgtttggcttttctgcatgcaagtgtgttttctttctctgaagaagacactcttattgacttcaatgaaaaatgcttttttttctagttcagtttcaaatttaaatcttcttgcattgataaagcgatggtagctgggatttagtgcctgtttgccaggcatcttgcatgtctgtaattttgcttttaaatgagtgcagaacctgaagtagattgtttaagtcacatgctcaacctaaactcaaggtaagctgcagaccagaaatcccaaaacagacattcctgcagctctaatacaccacccacgtgaccctgggacgcactggagatttcggcttagagccgcagaaaccatctgaaagacataagtcaggagacagagtcctgatacctttccctatttggccagttcatgatccagctagccctgggcaaactagtccatcttttggataaaataaacacctgcctcagaatcgcttgaacccgggaggcggaggttgcagtgagccaagattgcgccattgcactccagcctgggcaacaagggtgagacttagtctctaaataaataaataaatataaaaataaacacctgccttaagtcacaaggtgttttacaggcacctggtgtttctgccatgaaaaatgcatgcagcttcaagattacaggactgcaggaggaggctgcacaggctggcggggtggggagcctacctgtggggtgagtagaagtccgggaatgctggtgctctgctggggcagatgggatgagagaacactgggggtggggacagagagcctctgcttattttggtccccctctcaccccgaagaacttcagttccatcaaggatggggaaatgcaccatctccagaatagggtaatgtagtctgaagtgacagtcgtttgtgtgtaggaatcggtaaacgactgtgcacaatttactctttatattttgtataatctgtggactgtttgtagtttctagatgtttcaaaaagatgtctcataagagattgtacctgtagtcctagctactcaggaggctgaggtgggaggatcacctgaggctgctggttggaggctgcagtgagctgtggacattgcactccagcctgggtgacacaacaagaccctgtttcaaaaacaaaacaaaaccaaaaaagataaagtaggtaaggcaaaatttgaacattggtttgaaggctgagctgcttttcaaatacctgtatacttttggtattaaaactagtttctgtggtgtctgttgttgtgaagttgtctaatgaggtagacttttcgattttcatttttgtatcttattgtggcttatgtaaggatataacagggagatgattcatgattgcaaagtcagaaatgtgaaaattaacatcgttgtataaagtggtgtgtagaagctctttgtcacataagtaacaacagcggggttttgttttttgtttttgttttgtttttgagacggagtctcattctgtcgcctgggcttgagtgcagtgctgcgatctcaactcactgcaatctccgcctcacaggttcaagcaattctcctgtctcagcctcctgaggagctgggactacaggcgcatgctgctacacccgactaattttttttattttagtagagatggggttttaccgtatggcccaggctggtctcgaactcctgagctcaggtgatccgcctgcctcggcctcccaaagtgctaggatttcaggcgtgagccactgcgcccggcacaacagcgtttttaacactaaagaaccacgttagaaacactgaaaaaaggagacatttccaggagtttgtagtttagttgggatatcttgcaatacctacaggatacaattagaaaatctgctggtatttcatgaagagggcatacgcttttatacaaacagtggagttctagttgtatttctctcaaatatttgtaggaggggaaagggagaatcttcaagagagacagcgctggtcagagcatgcaggaggacgctgagccttgcaggcactgagggtgggagtcccggcagagaaggggacagtatgagtgactcccagagggtgtcgtggagaccattaggttttaggtcagcttcagaacctggaagaggacatctcagagtctggcgaccctgaccagggctcttgcaggcacgcctggagtgtggaccagatctttagattgatgggacaatgcgaggtcaggaggggtcccggtttgctcaccgactgcctgtcgtataggatggagcgacaccactgcgtgtgcatgacgatggagctgggtaggggaggctcagaactcatccgagatgacaccttgcctgcggcttggcttgcttgaagggtccccccatgtgaccttggagatggtatccaccaagccctcacccacaactctggctccaagaccagagctgctggcaccagcatctgatgcgatgtcttgtgttaggagaggcacggaatgcctcaggagacttggaggtggacgcgttggacctctgcagtttctgcgccatccttggcctcctgggaagggtccctgctgtcttatgctgcagacgtaggccatgaggacgtttcccggtgctggggttggggcacggtcaagtctggagatgcccttccacgagcgggtgtcgccagtgcctttctagctgagaaatgagtgaagcatgggggagacgggtgtgttcactgcagtcctctcacctccagaccagacgctgactccctcgcagttggtgttctgtcactcttgattttactattcctaaccctctgaaggaagttcaccaaaccacagaaagagtgctccaggacagtgaattgatgttagagatgatgacagggtgtcactgggcttctgcgtctgacctctcacgtccagacagacatcttccaaaggcccagctctggctgtctattagccgcgtgcctttcggtgagtcatttaacttctcacctttcccaggctgagggagggactttgaggttggtttcccccaccacgaccctgatcctccagctctgtgacaggacagtgtgcgctgcttggctttcagagctgttctgacggcacggcatgggaaacgcctgggtttggagtgagaaggttgcgtggttcttgctgcctggtgacttcggggcttctaaagcctcagtttcccccatttcatttttttttttacatgacataatgctattaataatttctgaaagtttccccatttctaaaatggagataactacccattgcgaggacaggaagaagcagggcatttgaatgcattttaaggtgccatttaaatacaggttctgttacttccaggcctgctgggcactgagcagctgtgtggctttgtgggtgacctactcagcccgtgcctcagcttccccagttgaaagatatggatactttttcttcttaaggtgatatgaaggggtgcaggtggtggcattccagaccaacccaggacatgtgatggggaagaggacgtgttgcaaagaataggtggtagggcctgtctggagctaggtagaggggccagcagctgggagggtgcgctggggccacatggctgtgccctcactgcaccgtctgcacagcaggctgtggcaggtgctaggggtttgggagacctgagaagaggctgttgaaattgtcttacttgggcggcagagagctggcttgggaaacaggcggtgcggatgggaaggggaaagcaggtggcagtgtggcctctggagaactgtggcgctgacacgggctaagcaggaaggtgggttccatttgggaggacctgggtcccagcagcctggggtgtgctgtctggggctgccgaggggcagagggagcttggggaggccctttatctaggctccgtgggaccctgtgctgtcactgagcacttgctgtgtgtgaggcctgggaccaggcttgggtgtggggaagttccacacggttcttgctttcaaagagtgcactgttggcgatcctgcttctgcaccccacttccctgcaggcttctcgatggttctcctcattgtgcagaccacactcagcctctgtgggctcagcaacagtcacagatggacctggctttggccttctgcttttcgctgggtgtcctgcacccagagaagcccacctagttttgtttacatcatcttacctttccgtctcttgcctttctcctcccatttttcttgttgcttctctgtcttccccttcagtcatcaccttctgttttcatctgaatttctctgagctgagtcaggtggcctcacacaggctgtcatcgtattctaccaggtgtctctggtcccactttctatttcatttcgcttgagctgtactcagtgagccgaggtcaagcagtgaagccacttctgcatctgaaattttaggggtgaaccagaggccaccttcagtttctgctctgaagtttgtgattgttttttaaaaagcattccaagtttaggccgggcgcagtggcccatgcctgtaaccctagcactttgagaggctgaggcgggaggattatctgagttcaggagctcgtgaccagcctgagcaacatggtgaaaccccgtctctactaaagtacaaaaaaattagccattgtggtggtgtgcacccataatcccagctactcgagaggctgggtgccggaattgactgcctgggaggcagagcttgcagtaagccaggattgcaccactgcactccagcctgggtgacagagcaagactccttacacaacagcaaccaaaaaagcactccaagtctagaataatgggcaccaaatattagaaaaggttacttggggcgatttgctttcttgtctgttttttggggttttctgtctgttttgttttgtagagacaaggtctccctgtgtggcccaggctggtcttgaactcatggactcaagcagtcttcctacctcagccacccaagtagctgggactgcaggtgtgtgccaccacgcccggcagtctactttttttttttttttttttcttttttgagacagtctctcactctgtcacccaggctggagtgcagtggctagatctcagctcactgcaacctctgcctcccggtttcaagtgattcttctgtctcagtatctggagtagctgggactactggtgcacgccaccacatggggctaattttgtatatttagtagagacagggtttcaccacattggccagactgatctcgaattcctgacctcaagagatccgcctgcctcggcctcccaaagtagctgtgattacaggcgcccaccaccacgcccggttaatttttgtatttttagtagagacagggtttcaccatgttgtccaggcttgtcttgaactcccaacctcaggcctgccttcttttctgaatgttcatcttgctttactttcctctactgaggatgtgtcatttttaaaacatcagaaggaaagggtgaacccctcacacccagccttgggctgctgggaggtggcctgctcctctgaggagtgagtgccgcttcaccagcctcatcagagctgcctttactgttgtgccttcttttcacatctcctgtgtgcctttgcctcctctccacctctgagagcccgtccagctcagacactccattctgttagcctttactgtttcactctccttgtcttggatcaccagtgctgtgatccactaagatttagcaagacatgtggattatggaattttaggaaatttatgtctgttactttttcaaatatacctaatgccaacatgggctagcaaaaataaacctgatacgtaacggcagggctggttagcaagttgtggtcttggaagatgatagtttagcgagtgtttcttaggaacctgaaaatggctctgaaagcctttgttgtgggtggtgcagaggtggacaggcagtccttgctgaagtgactccacgtgaggaatccaggctcctagtgagccagagtgccctgtattgaaaagttaagtttcaaatggcatctgtacctgtccatcatctgcggaagcaccaggttctggggaaccacctggttgattaagtccaggtttggtgaggaatgggcagggccagataacatgtcaggcatttgattagcctggttggtagcacagagcatatgcatacctgagttttgtttctgttgtctgtgcaggctgggaatggagcagccggaaagcggcctgggtgggacacacttggaactcattgtttattccatgccagtgtgttttgggctgtgagtgctggacattcaggtgcagcaccgtctggtagctctctctgcaacgatggccgcatgtggacattgactactagaaatggggctggcgtgactgagaggctgagttttttttttttcttttttaagttctttttttttttaagcctgagtctcactctgttgcccagactggtgtgcaatggcacgatctctgctcactgcaacctccacctccaaatttggagacagaccccccaccgggtgaggcactgagcctctagcctgcgtgtggctgcccaggcagggcccccttctgggtcgatgaagaagcagatctggatggaaaagcctgtgattatctcattaggaaatcatttttacaataatctacatttgcttggcttttgctttttttttttttggagacagggtctcgctctgccatccaggctggagtgcagtggtgcgatctcggctcactgcaacctccactacctgggttcaagcaattcagttctcctgcctcagtctcccaagtagctaggactacaggcgtgcaccaccacacctggctaattttttcttttttagacgcagtcttgctctgtagccaggctggagtgcagtggcgcgatctcggctcactgcaaccactgcctcccaggttcaaacgattctcctgcctcagcccctcccgagtagctgggactacaggcgtgtgccaccatgcccagctaatattttttgtgtttttagtagagacggggtttcacaatgttggccaggttggtctcgatctcttgacctcgtgatctgcccacctcagcctcccacagtgctgggatgacaggcgtgagccactgcacctggccacgcctggctaatttttatatttttagtggagatgggatttcatcatgttgcgcatgctggtctcgaacttttggcctcaagtgatccacccgcctcagcctcccaaagtgctgggattacaggagtgagccaccacgcctagccagtttttgatttttaaagcatttttgtttcagagtttgaaggtttcccagctttttatggtcctgcagttccataaaaagagaaccctggttatcacagggatatgctgacagttcccgctccctctgcgaggaggaactgaaatgggtgggaggaatgtgttaggccatgaaaagtttttatctgtggtcttttgactcctgccacatctctgcctccggtctcggaggagcctggccagggttctcggtccacagctggggaatgaagcctcctcggggtcgtcttgggcttttccctccttggtctcagaggacttggcatgagattgggaactgatgctataataggatttgcaaggttatcaggtcattctcagaacactacgtttttttggtggacattgattgagggtaaggaattttaagactaaagattcttaggcgttggacagttcatattctgaagcactgattttatctaaaagaaggtggtgttttacacgtttgtttccttgagtttgaatctcaacctacttatttgaaaagatgttaagaatatttaaccaaaaacctcatttacaaaagaaatacgcatgaaatgtgatgtgaggcttcattttgcagagggaagggatctctgtctccattgtggacagggcgtcttaggctgcagcgtcattgtgctgttacatggttccacataaaatcttgctccttttctaactgtaaaaacatttgagggtcatttggccaggtaaagatcctggcagtcctaagcagcctcgctggtgccgtgggtcctgggtgctgcctgccagcatcctcggttgaggagtgtggagtgggacctcagggcagtgggcccttccctcccaccggccctctaccctgcccagcccgccagctttctggaacagatcactgtacggtgctttctctccaaggagctgaaggtggtggatcatcgtctggaaatgtgtctggggttgcccctgctgcccctgcagggggctcgcgctcctcctcccggaacttagggtcttctggtggcgagaaggaagaaggcaaaaaggtccggcggcagtgggagtcgtggagcacagaggacaagaacaccttcttcgaggggctgtacgaggtgagtaggctgtggaggcacggccaggcagcctgggcgtccctctcggatccctgccctccgttccccgtgcttcctctttgctgttagattctagaacgcagattcctgggcgacccccgcagtggcggaggctgatgtgggctctagccttgcccactgaccttggctgttttatctcctcattgagattttagaagctagtactggtgaggtgtctgtgaggaggtgtttttgtgtgtttccttcatttccttttggatattctcaccccttgtctctcaaagatgttcttgactgaaggccctcttgtttcagggctttccctttgtgctgagtgggctgatttaggcgggatggcctcttgaggggaggcacaaggcggtgcttgtctcgggggtcagtgtagctgagaaacctcacgagatgttgctgctgacttgggacaaaatggaaagtcctaaaaatagagagaagccactccctgaccccaccgcccagtgaatgcccgtgctccctgctggccagtttcacctgcattattgttttctaaatccttgtaattattgtgagcatactttttaattaacattgcttgcatttttcacggtgtttcatagctcttttgctctgtatttttttttaacgcctgtaaatattctccttgcctgtgtgctcactgtgtgcttttgtaaaaacatcatattggagcacagccatggccagggtcgatgtactgtctgcggctgatgccactgcagtggcatagttgaagagctgcaccagacagggtggcccttgaggccctggccagccactgctctgcttggccattcctgtgtggtcaaggatgactgagatccttccagattctgttgtcgtaagtaacgctgtggtgaacatcggtgtgcacgcttcatactttagactgcttctttggcatacagtattagaattaggttcgtgatcggtgagccttgttctttttttttttttggagatggaatctcactctgttgcccaggctggagcgcagtggtgcaatctgggctcactgcaacccccgcctccttggttcaagcaattctcgtgcctcagcctcctgagtaactgagactataggcacacgccgccacacccagctaattttttgtattttagttgagacggagtttcaccgtgttgcctgggctggtctcgaactcctgagctcaggcaatctgcccactttggcctcccaggagccttgttcttttaatagctaattaattggggtgatggagaagtcttgtcaagcctgggaagcagaatgctcaagaaagaaatggaggctctggaatgagatgtttagagaggcattagaaaaggagacactcgtaaatgtgggcatgagacttgagtacggtgcatgctgtggccagggtcgctcccgccctgggctgcaggttaggttctgcccaccccaggtggaccggactgccgtggcagtgtggcttgattctgattgtccaaagagaagtgtgcatgagtcccattgcagtagatatgaagccatttaaacacattcgtgtgttccttttcttcccttggagggttctagagtacagcaaggaggctggttttgtgtagattcaagccccaaatcgtgcctttaagctgtttgttggtcttggaggacctgcgattcctggaatgttttcagaatcagcaaccattgctgatttttgcctgaaacaattactcctgtggtgtggcccttcctccttggcaagactgtagcctctgcaagagggtctgggtgcctgggagcaggagatgtggttgtccattaaaggtagcagaggaggagttccttgttaatgatccaccctttacccttattcaagcagttcagttcgtgtccttcccattgggttaagctgctcattagagtttttctatcgggtagatgctttttgaggattctgaaatcctgaattagtaataataattaatagttggctgttctgatcatgtaatgctttctgctgtgggttctctgtatctgagtttgtatatgagaaagagcgagggcaagagaaaggactttttgtttgtttgttttgaaacggagtttcgctcttgttgctcaggctggagcgcagtggcacgatcttggctaaatgcagcctccacctcctgggttaaagcgattctcctgcttcagcctcctgagtagctgggatcacaggtgcccgccaccacacccggctaatttttgtatttttattacagaccgagtttcgccacgttggtcaggctggtcttgaactcctgacctcgggtgatccacctgccccagcctcctgaagtgctgggattacaggcatgagtcaccgcacctggcctaacacgtttcatttctgcattgtgtgtctcatcaaaactaggtggccttctggtggggtcttgatgtgtggctgactggccggtggcaggtgtgactgtgaaccctcaagctgtggggtgacggtgactgggcacaggcctctgctctgagaagtgcggcttctgccatgttgtcatggccaccgctgcctttttgatgcctccctgggaggggtgcagcaaggctggctggggcctgattggatgcagggaccccaccgccatcactgggcctcagttggtcactcctgatcatgggctgaattctctcctgcttcagctgctcctcaggcgagagtgctgcccctgcacaccctactttgggcagtgctgggcatgctcagattcgcgcccgtccagttatggcccgtccagacttctccctctggcagggcgggcattcacctgtggcagggcactcgcctccttcctctgaatacccttccatttctgtggcaggtctgcacagacccagccctgacttcatttcaagttcctgttcctgcttatatccgtccatcatccatgcttgtttttgccatacagttcttgatttcctacctgacagccacacagccagcgtcctgtgcttccttctccctctctgcataatggctgcggcctcagctctggcctctgtgcttcgcagtgttccccttctctgtccccacctaggccctccctgtctctgcacaggcagccgggggcatcctcagcctgttaccatctccacagctctgtggacgctgcaggtttctatctcttcaccccagacagctctctcagactttcagccctgcccatcttttgttctcattgccgttaccgtgtgtatatctggttcttgactcaggacagagcactctcgccacactgagaatacagaaaagcttctgtctggtggggcttgctgccttggagacacacggcaggcgcgacacagatgccctgggactttaggaggcagcagaggttaagaacacgtgagcaggaggcctggaactcaggttctcagggaacctcttgagtagacgaccccgcagtgacatgcagaggccgtcaagttgcttcatcgtggttcttgccgaggcccagggagcgtggggagggctgggcctgcctggaccttgcaggaaggcctttcacgtgctgcttcgcctctttatgctttatctgccattccttttgaaaacaatgaacacgttttactttttctaaagtttttaatttttcatttcatttttgcacccagactggggtgccagccttccagccccacccgccagcccacagcagcttctgtcttcacctccctcagcccctgtgttgctgggagttacagatcctaaaatgtgtcagtgtgtcaagcacaatgccacctcccctctggcccctccaggtcacctcacggtcccccagctgccaagagtcttctgaggtggacagggttgggggccagcaccccagcagtccccaggttctcatttccctgaggatcttgctccccagttactaccccttaccccccatcagcatgttttttatttttttgatttaaaaaacatctttttttgagagtcagtcttgctttgtcacctaggctggagtgcagggctgccatcttagttcactacaaccttgacctcctgggctcaagtgacgatcctcctgcctcagcctcccacgtagctaggactacaggcatgtgccaccatgcctggctaatttttaagttttttgtggagatggggtttcactatgttgctcaaactggtctcaaactcctgggctcaagcaattctctcacctcagcctcctaaagtgctgggattacaggcacgagccaccacctggctcccttaactttttgttttgaaatgtttcagactttttaaaagttgcaaaaacagcacaaagcaggtcccctccaccctgcctccacagcattagggcagccgcactgtgagggtatgagcacagacatggccctgcctgctcatttgcaggcggtattcagattaacaagggtcccactcaggtccatcctggccaggacgctgcgccgcactcggctgcccaaactcctcagtctcttgtaacctgggacagctcctgggtttttgttttttgtttgcatgtttttttgtcgttgatgacctcaacacttgtggagactcacagcatgttggtttgtagaatgtcccttgtgtcagtttgggttgatctgcagtttcctcatgattctatgttacgcatttctgtcaagaattccacagcagtgataccgtgtccttcttggcgcatccagttggcggcccgtggtgttctttctgtctccgtcctggtggtgtttgccttggtcgctgccctcaggcagcgtctgccaggtctcaccgtggctgggtcatggcttggctttgaggctgtgtaaataccgtgtttctcatcattctttgctcccactgatttcagcagccatcgctgccttttccctgaagcagttgttactgtgctgtttgctcccagtgaggaccttctgtttcctttattctttctgtgtttgctgattggaagtcctgtgccaagaagagccctgcgttctcccccacacgtgcagttattctgttacctacacccatgtagactcacagatgttggctttattctgggggtcatggtccaccatgccattgtcggctttctcgccccgttggttccccatttggccactggggagcctcatgctggctcctgcatcctcttctcacgtccccatcgcctgccagtgtattctcgtgtgctggtgccgtcaggcattccagactcagtggctgcttgctgctctgcagttggctgtttttcctgggagcccagcttccctttgcaaagtggtatttagaaaccaagacctgggcgctaaggatgctggttactgctgagcccttccagtacttaggagcttggctttgatgagatgatcgaacactaggttctctatggcagtgcctgaagcagcactgaggtgaggctgttctgtggaacacaagttctcttctgaaaatctaagtcacactcagcttttgcaaagaagcgttccaagaagggttggcctccacgtataatcagagtatagtctgtgcggttcacttactaaatgctcacgtttgctgtcctcgtttgaatatggaatatattttgtcagattaaagcagtgaggatgtttctgatctgttctttaagatgccataactgcttctcttccagagcttttcttcatggaggtgtctcatttcattatctgtgaagaactctagcaattaaggcatttgtccaagtgatgagctttatgtttctcctgtctggggtgcttgcctctttggtatccatgtgctctgatggttctgttcctggttccattgctcctttatcctgattaaaacctaaggttccagggagtcgaagttcaagttcatacacagataagagcttggaagggctgcttgtttgactacagcctgtctcctttctcctttctcggaaccttggaaagggtccagttaacacagaaagctgcattgttttaacccctctacatttatcatggaatttattttccagcatgggaaagactttgaagcgattcagaacaacattgcgctgaagtacaagaagaaaggcaagccagcaagcatggtgaagaacaaggagcaggtccgccacttctactaccgcacctggcacaagatcaccaagtacatcgactttgatcatggtgagtgtgccacgggccaggctcgggggtgcccacaggcagggccggcttctgctcagagcgcagcttccagcaagcccgccggacctgctttctggcattttctcaccagccgcttggcctggggctcctcgccttgcagcgctttggctgattgtgtgctgtctaactcggtcaaaccaagttgccaggaagtggcccgtatcccatgctccagggttcttaccactgcttttctgagctatggtttgtgtgtttccagtggctctgagtgtgcgtgagttctgggtccctggctcacctgaagcctgtggtctccactgcaaatgatagcaccatggtccagcgaggggcttgggccgcaggcaccgtgcctggcgctggtcttcctgggggacggccagccttcccaggcctctcgccctctacactgggacccaggtctgcgtcggccctcgttcagtcacgggaccaagtcatccccaggtagaattctggcttctggctcagagcaccctttggctactggtggcttctccggatgatgctttgtccatcaccatctctgtccttgggagtcttagctgcctcctgcctccgcctatgagaactacctctccagcagcgcacctgtgctgggccctgctcttcattcctgtagcttcacacacagcttggtccttccagatgtacccccagagcacccctctgccttctgagccttctttcagatgtctcacattctgacccagggtacctggactgtggccacactgccactctttgtgcccttgcctgtgcctcgtggtgacctaaagtccttcgccttggccattcctgtggtgtcctctgggtgggttatggcatcttgaccatggtgcatcagctttgcccggagctttgggaagagccaggacccagctcccctgtgtgactgggcagagccctgagggccgcagacaccccctgcccaccacgcagctagcttctccactgaagaacctccactgggagattgtcaccgtttctggagatccatggaaacggctgttggtctctgcacattaggggtaccccttgattcgggtctgccgccgatgcggttttgtttgtttgcttttggtatccacgtgaccattcatgtaagattttctgctgacttcacctatttatagcacatcagttccgttttgtcctatatttgatgcctgtgctggtcttctcatgttcagctcacttgtttatttgaaatctcagcactggtcagatcccgtcatccaaggctgttgtggttaatgtcaggttgtggtgagtggccttgtgccttccagagtggcacgcagcaccgacttttcattgtcggcctcttcctgtgtcgtctgtcctttgcatcgttcattagtgcctttttgaaagacagtccaggctgcgcgcggtggctcatgcctgtaatcagcactttgggaggcagaggcgggcggatcacgaggtcaagagatcaagaccatcctggccaacatggtgaaaccgcatctctactaaaaatacaaaaattagctgggcatggtggtgcacacctgtactcccagctactcgggaggctgaggcaggagaattgcaccactgcactccagcttggccacagagcaagactccgtctcaaaaaaaaaaaaagaaagaaagtcagtccatgagagcagatctgccatccactgtggctggtcttgaaaagctctctatgggggaagctggccagcagcggaggggactgggcagctgtttagtagatgaggtatagagagagggatgggattccaggagcttcggtctagtgtgctttgcttgaaccatctgcgggcagggtgggaagcgtctttggaccctcaggctcctggcgtagacttatctcctcttctgaggttcaaatgcacattctacttgccaacccaggctctctcccatgtcaatttcagaaggcagtcaaagcaaacatttcttttctaattgtgtcacctttccctgttaaacaacctcctaatcctaaacttgctggtgcgaggaggcctcattcctctttggcccttctgtccatctagggtgaagggtaaatgctccctcacacctctcggtggggggtcacacccaacacaggtccttttcccttctccgtgtgggcccctgtgcttccctctcttcctgacctggcacagcaggctcctacagccttggtgtctcctgttcgtgcatctttggtgtgaccccacatgatgtgccttcttcctgttgagctcaccgttctcccgtgttctcccgggttctctgatggccctgactgtctcttcagcagggctgtctgcctccgtgccagcgggcagcggcattggggcacccgatgctgacttgcccaacaggagcatgaggctggaggccactaggacactgcgaagtgactggccccatggactgtcattgcgcatcaaacagagtggcaactttttcacgttacatgtatttttggcgtgctttggagttttgttttgttttgttttttgagccagagtcttgctctgttgcccaggctagagtgccatggcgcactctcagctcactgtaacctccatctcccagtttcaagcgattctcatgcctcagcctcccgagtagctgggattacaggtgtgcaccaccacacccagctaattttatattttttaggagagatgaggtttcactatgttgccaagctggtcttgaactcctgagctcaggaaatccacctgcctcggcctcccaaagtgcaaggattacaggcgtgagccaccacgcctggcctgtgctttggagttttgaagagcacaccgtgtgcactttatcatgggtttgtctgactcatcttgtggcgtgagacacagagtggtggcaagcgagcgtggaagggactgactccgcccccagcttgggggccttgcgtgtgtgttcgtcttactaatctcccgtggtttccatgcacatctgcgtttccttgctgctgtccattgctcagtggagattttgcttcacgaactcaaagttggatgaggtgagcttggttcctgtccctgagtgtgtaataaaacatgaggtgccacctaggaggccgtggggccaggcggggcatcagggacacctcccggaagccctgcttcgtcccagggtcccacctcccctggggtcccttgtctgcagtgtcttgctcttggtgctactttcttgtttctgggttgtgggtttttttctttttgccatttcaaatagtggactttaaaatatatattttagaaatggggatattattcacccttttaaagcatacaacttagtggttcttaatgtacttacaaggttatgcagccattgccactctctagttgcagaatatgtccattgcccaggaggaaaccctgtgccccggtgctgggagccctcagtttactacctcctgtctctatggatcgttctactctggatgtttcatagaaatgggatcacgtgctatgtgtccttctgtgcctggtttccttcactcagcgtcaggtttcagggtttgtctgtgttgtagcgtgtgccagtcctttgtatggctggattattttcctttgggtggatggccacattttgcttgtctactgaatagtggatcttaaagctttccgagtcatgggctcctttaagaaagtctgatgaggccaggcgtggtggctcacgcctgtaatcccaacattttgggaggccgaggtgggcggatcacctgaggtcaagagtttgagaccagcctgactaacgtggtgaaaccccgtctctactaaaaatacaaacattagcagggcgtggtggcgcatgcctgtaatcccagctacttgggaggctgaggcaggagaatcccttgaacctgggaggcggaggttgcagtgagctgagatcgcgtcaccgcactccagcctgggcaacaagagcgaaactctgtctcaaaaaaaaaaaaagaaagaaagaaaaaaagaaagtctgatgagcccttaggtcttaggtctttctctcagaagagcctttgagagcagttggcctgtgcttagccgtgtccgagacccatggtccagaatcctcctcatatcttgaaagcctgcttctccatttaccagtcttagggccttgagaacaggtctctgaggagagaactagagaggacaattgtgagagtagaggggacaaatggccttcacccctgctctgtgaagtgacccaaaggggcctggactgtgttgtcacttggtttccctagcaggattaggtctggtgtaatacagtaacaaaatgcaaaatagcagtggcccaagcgcctcagaattcactgtctcgtggcagagacgcctagaggctggcgcccagggcaggcaggacccaggtgcctcccattcttgtgcttggctgtccttggtgacagctccaggcagtggctcttgaggaaagaggggtgggaaaaggggaaccctcctgcccaaatcaggctctttaaggaggcttctggaagtctccactacttccagtggtgtagccatgaccagctgtccatgtctcagcctgtttgcctcccaaataaaacaggggccttggctgggcacggtggctcatgcctgtaatcccagcactttgggaggttgagacaggtagatcatttgaggtcaggagttcgagaccagcctggcccacatggtgaaaccctgtctctactaaaaatacaaaaattagccaggccataatggtgtgcacctgtaatctcagctacttgggaggctgaggcaggagaatctcttgagcctgggaggcagaggttgcggtgagccgagatcatgccactgcactccagtctgggcgagagagtgagaccctgtctccaagaaaagaaaaaaaaaaaaaacagggcctcttactgaggaaggagaatgggcctcaggcaggggtgagcacctgtccttggctcctcctcccgcctgggcccgggctatgcagatccactgtcctgggagggcacaggtgaggcaggaaggcagcatccaggtttcagggctgctggcctcacctgtgtgcagagatggatgacaggtttagtgctggccacatctgccaccttcacgagtaccagctgttctgagtgttgtgttttctcctccaggggacatttcctctgcctattggggtaaatttctaacgccccactttggtttaactttttattttgaaaatcgcagacacagcaccgtgttctatacactctgcccagtgtcccctgtggttgacagcttgcatgacaaaggtacagggaggagatccaagaaaccacgtgagcctggtgtggctctcacacccaagccaggcagcgcctcctgttcccctctctaaagccgccttctcttctgtttctcagtgttctctcgaggcctgaagaagtcatcccaggaactgtatggcctgatctgctatggcgagctgcgcaagaagattgggggctgtgagtacgctgactgtggggttgcccacggctcctcctgtcctttgtcacctttgggctttagtgctcagagttgtttctagtttccctctaacttttatcttgaaaaaattttactagaagaggtgaagaatatgatggcggccgtgctctttagcttagatggacctgttgctgacgttggctacatttgctctctttctccatgcacatgcacacatgctcgcgtgcacacatgtgttcacacactctgcattccactcgactgtaagatgtcacgccacagcccagaatacctccaccggcatcacctcagagaacatttctcctatatagccttgataccatggtcgcacctagacttttagcatttaccaaacaggtgtagtgatcttacctaatttcctgcccatattcagattttctaaaacatcccaaaatatcagtcagggcttctgtcaagggccgttgccctgcatgtgactgtggagtctcccttgggtgtctttgacttagagcggccgcactgcctgggcttctgagacattgcaacgcgctcaggccttcctcacgcaggcccttgcttggatttgttccgatcgtctcctcgggaccagattcccttgagacatttttgacacgacctctaggtagggacattgtagacttaccaggcgcttgtgcccagcgcccctcagccctgcttcttctgcctgacttcataagaagagagcatgcctgggctgtccagtgggcactgtaggggatccccccctcttcagtgggatactgcacgaccacgccagctagcatgtcacagctcagggcgggtggtggggctgagaggacagatacggagcagtcgccctgtctgtgccaggcctgcaccacactctgtccccttgctgcccctccatgccttgctgtgtcctgcggggtggctgctgcaatctagtgtggcatttgtgtgtgggaggccctgccctcctgcacttccccactgggtctgtcccctgtgggcccagccactcctcttacctcctccagcctgcctctccagcccgcactcatgtccgtgggcctcgtgtcccagctcttcatgcctgttcctgccgcctctcatctgccctctctcagccttgggaagcatcccaggccccaaggagtttacgccacagctctcccagctctcatcttccccagataaaggaaaaccccatcttgaccatgtgttcccactccttgttgcctggtccttttgcaccactgcttgttctggtttcctccctagaagcttctgagaggtggagggtgtccaggttcttggcatttcgaacaaagaattgtacaaaatgcacaaacaaagcaagggaagaatgaagcaacaaaagcagagatttattgaaaaccaaagtacactccacagggtgggagtgggcccggacgtaggggctcaagagcccttttacagaagtttccccctctagagggggaaacctctagaggtttcccattggctgcttggtgtacaccctatgtaaatgaagtagtggccagcaatcagagactgaagtgaggttacaaaggttacactctatgcaagcatctgattggttgtggaaaacaaccaatcagaagctaaactggttacaaagttacacttctttgcaaaggaagacttggccccagtcttggggaagactttttagactttttcaaacctagcagaagcaaccagtcaggctgaagtgaagttccaaagttgtactcctatgtaaatgtccgattgctttctgctttctgcaaccaatcagagatactttcaatttcccatctgccatgaagaaagaaggggagggggcgttgcaaagggaatagcgtgtctggtccgtttgttacttaggtgtggaaagttggggttttccttttgatttagttctaggaagtcagcgtgaattggccttaggttccctacctctagaccctattctcctgcctcatgaggatgctcaagtttgatgaaaataaatgacttgattgctgagtgaggggcacactgctcccaggcttccaacccttcatccgggagcaggagaggtggggcacggtgaccctgtggcatgccatgcctggccggtttccgcaaccggttcctttcttggtgcctcgcctggcgacaagagccctttccggtgcttttcattccttcctgaagttccgtttccatctggctttgtttcctttctttctgaaaaacctcctgtatttttttccgtgcagttgtgccggctgtgaattcttagttattattaatctgaaaattctttatttcatcttcattcttaaaagatgtatttgccggatagagaattctgatctgacgggttcattctttcatcacattgacaccgttgtctgctgcctcttggcctgtgctgctctgatgagaggggtcagtggtcatctatgccctcattcctccgtgcgaggtgcattgtctgtctgtggctgctttgacaattttgtctttggttttggttttcagcctggtcgttcgtttgtggagtttttttccctaaaacatgcagaagaattcaaagaattttacagtgaacagccaagtacccagcacctagtctctcccgttaacgtactgtagctgctttcttgcacatcttgaagatagtgaagagtcccgagcaggtcacaggaaatggggcgtctgctccaggaaactcagagggtgtcggagtcttcattctgtggaccctgggtgccttgggggttccacactgtgggccggaaggtcaacaccggacactgtcagtacgagcccagcaggaagtgtgcgtgggcaggtgtggtgcctgcaggaagcagctgttgagccaggcagatagggatgagtggaaggccggcgctgggggacctaggagggagctcttgggaggacagatcaactggtcagaggctgggtagtgggcctgcctgaggagggggccaggcaggggcgtgccaggctttcaggtgagcgggggcgaccagggcagctgactcgaaggtgtgactttgagggaggggctgcagctactgtagggcttttattccagaggaactttaatattcggtaatgggatttgagtctatattgagcggaattgtatgggaatcttcagtggctttgctcctaactacattgtggtctcatttatttattttttccatttaaaggtatggatgacaagaatgcaacaaagctgaatgaactcattcaggttgggtaagtcccagtttccatgtgaaacatcacttctctgggtgttttgtgtttattctctaaaatacagaagctgaaatgctctcagtgaggaccttccgagttaaaacttcataacctctcagttacgtgttcagtcccaacaaaaggtgcttggtccagggagcagtgactgcgcccagagcctgtgcctgccccggggagggaaggaagtgccgtctttggcctcctccttcccgagggtctctggctgggcgttgtggtctcgacgcagcactcagggccctgctttttgtgctccttttcctccacctttgtgcctgctgtggggctggtccccggcttctagggcctctcctttccattgcatttttgtcgtgtcctgggccacttctgacagcttccctgccttcttgtgccctggatgcttctgtctccaactggccgctctcctcccctcacacacctgactcccagagggcacatgctctcctggccacacaaacaaccgggcccctgatggtccagttgacatctgcccagttgctgctgttgggctgcacttcagggcagggccccgccaccctactccacagcctgggggttccctgctttacagcttggggaaggtccccacgccacagcctgggggggttccccactccgcagcctgggggtctccactccgcagcctggggggtccccactctggagcctgggggggggtccccgttccacagcctgggggttcccagtgcacagcctggtggggttctgtgcatgtacatttctcacctggtgtgggtcctcatgggtagccatcccatcttacatccatcccgcccactgaccacaccagagctatcccggcagcctggctgactgctctcagttcactgaaccacagatattgggtctgcacaaccagccccgatccttgtgggtatgccacccgcacccaagagccctgcccttgcagccactcctgaacagtccttacccatctctcttccgtccatagcacttcacccttggacctctggttgcttttccccttggcccttctcccccaggcttgtgtctgatgacctgggaaccctccctgccccagtgggagcagtgcctgctgggccagcacaggccttccctccagtcccagcacagcaggtgttgggcatgattcccaggctgtgtgtgagctgccaccagcctgcagccaacgactgtaactgggtgaccacagccaccagaaagtgcagccagcttgccccaacactggacagacttcccagagtgggtctggggtacagccaggggccgccagccatagggagggtgttcaccgccttgcccaggcgcccctcccagcttcagagccctgcttccttcccactcttgctcctgctctacctccatcaggcagtatctggcttatcctgagcagcactgggcacattggaggaaccgtcttgagaaggcccaagatccaaggcttggttggtttctgatgtcagctgaccagtaggcaaggggctgtcccatgagggaaaacactgccgcaggatccatacttggggcaaatcttacttcaccttttatttcatttcctccatgattgatggaatgaagccagagttccagactctttgctgtatgcttgaggacggtgcacagagtggcctgtccgatgagcgttccttttgccaaaacacagatgtgctgcccagcgggggcgtggtgggcacctgcagcgccatccgcgggagaacttatgtaagaaatagattccttctgaccacacgggcacagggagttcccagggactggagacacttgacaaacaaatgcaggtagtagctttgtggaggtcttgggcctttaaaaaaaaccaaggaaggagaaggaaagaaatggttacaaagagtattctagggacaactcggggggctttgattatgggctgcgtgatagagtgtagtctcccgagtgatgacagggttgtggcttgcaggactagaggtgctggctaaagtgtgcagagggaaagtgccttctggtataaagaaccctcaggttgcccaggcgtagtggctcacgcctgaaatcccagcactttgggaggccaaggagggtggatcacaaggtcaagagttcgaaaccagcatgaccaacatgatgaaaccccgtctctgctaaaaatacaaaaattagctgggtgtggtggtgcatgcctgtaatcccagctacttgggaggctgaggcaggagaatcgcttgaacccgagaggcggaggttgcagtgaaccaagatccctccactgtgctccagcctgggtgacagaggaagactttgtctaggggaaagaaaaaaaaaaaaaaccctcaggtggttctgccgagggaagggcaagaagcaggcatgggcctgggccatgtctgtactcagtagcatgtgtgctagcgcccctccagcctcatcctcccgggcagcaggtgcgtggacagcggaatcgaaatgtgtcatgagcttatgcagcacgcttggtgccatttacagtcatgccatctgccactctgagaaccaaatgaagagggagcctggcatgggtccccagctcctccaggccgcgtgttgggcatgttggccagaaggcggcatggctgaatgtcggctgtcatcctctgctgtgctcctgcagtggaggggctctgagatgactgactgtgggcctaggcggtgggcctgtcagcaggatggcaagattgattgtcctttttcttaaggaagctagtgttgaggtagctcacctggctaccagcttgtctggaaaagactgggcaggtggcaaaagaaaaggtgagctcaggtgtgggcgctgatggggaatttgcccgtgtagccaaggattttggcaaatggcaggtgaaggcagtgctgactcctggaccgagtgctgggtgaggccgcagcgagagtgggagcctgcgctaagggacttggccgttctcacctgactctctgggccccagcctcacctgtcgtattgtcatcctccagagaggtgtgagacacggagaaaaggtttggaacagcatggtaccagcaaggaaagatttctgtctgcacccatggagagatctgaggcagaacggctgctgaatagtgtgttcattggttctggaaatgtctgggtgcctgtgtgtgcctggcacaggaatgggtgctcgttatgcagtggtgacagctgtggtgtggcagctgatgcatgtccattgaacaggtcaccttagcatgtggtgtagacatgtacagtaactggggatgaaagttactgtgaaactgacgtggcaggtgggtgcagacatggcaactggcaggaagggaacctgcctggggcgtttagggaagcgatcaggggccacacaaagagttggggaatcacctggcccagggaaaggaaggtgggaaggaggaactgggtcatggaagcctcaggaggggaggggagaggaagagtgcagagctgaggctggagggctgggccaggcccagctctgagcacaggagggtttgcagcaggagagcccctcgttctgggtaaaactgtgcctctcgttccctgtggagaagagatggggacgctgttggaggtggtgtggtgtggtgtgtacattctttttctttctttccttttttaaatagaggcggggtttcgccatgttgcccaggctgatctcaaactcctgggctcaagtgatcctcccgtcttggcctcccaaagcactgatattacaggcatgatccttcacacctgacccattttttgctttaatatttttacttttgttcttttttttttgctttttgtcatagttatagaagtttgttttaaaacattttagtttttagagcagttttaagttgacagaaaaactgtgtacagagctacgcccctcccctgccccacacgatttcccccattattaacacttcgttggtttattttcttttgttttgtttgagatggagtcttgctctgttgcccaggctggagtgcactggcgcgatcttggctcactgcaacctctgtctcccaggtttaagcgattctcgtgcctcagcttcccgactagctgggattacaggcgcccaccaccacgcccggctaattttttatatttttagtacagacggagtttcaccatgttggccaggctggtcttgaactctcgacctcaggttatcctcccaccttggcctcccaaagtgctgggattacaggtataattaacactttgcattcgcgtggtccttttatcacaactcatgaggtttccttgacccttcttcatcactcagagtccatagtttacttacaggcccactcagcgttgtgccttctgtggttttggacagatgggtaatgacatgtgcccacccttctggcatcacacgggggcagttcactgccctgaacaccctgtgctctgcctgtcacttcgtagtgcccccagaagccactggtctcactctctctagcttcaccccagcagcctctagtctcccgctctctctagctgcacctttcccggagtgtcgtcgtcacattggaatcatcctgggcttagttttgtagattggcctcttcacttacagttctagaagttttcacaaatttgtagagttgtgtagctgccaccactgtcaagatatggaacgctgccagcaacccccaagtccccttctgtccctcccccacaccttgccccaagcaccctttgcgccactctccgttccctgtaattttgccttttccagaaagccatctaaagggaatcgtggtgtgcagccttctgagatgggcgtccccactcagcagtatgccctcgaggctcttccgtgttgacttgtggatctgcagcttatactttcacctgctgagtcatgttccacagtgttgacatgctgcactgtgttatcccttccaagtggagggacccagggctatttgcagtgttttagtgttgatgaagaagtgcccaggctttgcctccaggtttttgtgtgagcgtggttttcggtccccaggaggaggaggaggtgggagtgtgtgtttggctttacatggagctgccagactcttccaagagagttgcagttgcttcccacactccccagcactcagcgtgttcggggtgtttgtctttctaaagtcaccctagtaggtgtggagtggcatcatgctgtggttttgatgcgtttccctgatgactcatgacaccgagtgtctttctcgtgcttatttgctgtgtgtctttggtgaagtacctgttttcttcttcttgagtttagagaattctttgtatattgtagacacaagtcttctgttggatactccatctgcaaatactttctcctagactgtggcctgtctttttgttcacttactgtcctgcacagagtgaaagtccttcgctttgatgaagtcaagtctgtcactgttttcttctatggtttatgcttttaatatgacatctaagaactctttgcctaacccaaggtcacagagatgtgcccctgtgttttcttctagaagttttctagttttacatttaaatccatgatctgctttgaattaacttttgtgtaccatgtgaagtttaggaggagctttgctttttgtctgtgggtgtcaagctgtgccatctgaaaggactgtctctcctccattgagtggcctttgcatccttgtcaaacatcagttgactgtaccgtgtggttccattctggaccttctgttctgtcaacttttgtgaccgttctttgaccagcagacattcgtatttacaaacaaacaggaaacctgtcaaggtgagagattgggaaaatgactgaggtgcctgtgggaggctacccctggatttcagcccaaaagcgattggggtatttgacttgctgtcgcctctacctctcatgcagacctgtttcaattaactgtgaatcttctttggttttagaattgtaaaattaaattaaagactaaatgaattgagtaaagctctaaactaaagtgaaagcttactacgtggttcgcagacccagaggcctaagtttatcacgtgcttattagatttatcaagtggttttgcagagaagagaataaatgtatccgaaacgaaagccaggctcccatgtacatagagggattactctgttttcgattcagaaatgctgttctgttctgcaatgatatttctattctgaaatgctattcacctaggcgtggtggctcacgtttgtaatcccagcactttgggaggccgaggcgggtggatcacttgaggccaggagttcgagaccagcctggccaacatggtgaaatcccgtctgtattaaaaatacaaaattagccgggtgtatgttggtgtatgcctgtagtcccacctactcgggaggctggggcatgagaatcgcctaaggccctggattgggaggcagaggttttagtgagctgagatggcaccactgcactccagcctgggcgacagagtgagactctgccttaaaaaaaaaaaaaaaaaaaaaaaaagctactcatggaggggtgtaaatagagcctctgtttgagggctcacttagaggtcagcttgtgattcttctcttatagccctgtgccgggcctatctgggaagtcttagcctgtcttacagcttccaggctggtgcgaggatggggaggtatggacccacgtcccggaactgtgaccaggcctaagcgtcaccctggctttcgcacttgaacatggcttttcatcgtgttcagtgtcgcagcctcaagtcggtcgcagaacttccatttgagagaaaaagacggaggactgtaacctcagaatggttccatatgaatgcagaagggtgcacttagtttgattgaaggaaaaaaaaaaaggaagtcacaaaatagcagtttaacggaaaatgtgattattgaaaacacaggtgccacatgacacagctccgccagctgtttaaatcttgcctactactgttgttttggggcagatggaataaaaaatggtgagtggaaacgtccatttgtttccagagcacttcattggaggagattattttagaattgacttgagccgggtacagtggctcacgcctgtaatcccagcactttgggaggccgcggctggcgaatcatttgaggttaggagttccagcctggccaacatgga[132 bp omitted]attgcaccgctgcactccaggctgggcaacacaatgagactctgtctcaaaaaaaaaaaaaaagaattgactccatgcttaatgactgcttttgaccaatgtttcccctggttccttctgctgccgccctactctgacatcattaatgttcataaaactgctgtggcacttagatctgtgtatttcagctgggttaaggtggtttaagaattttgtctcaggccgggcgcggtggctcacgcctgtaatcccaacactttgggaggccgaggcgggcggatcacgaggtcaggagatcgagaccatcctg[139 bp omitted]ctgagatcatgccactgcagtccagcctgggcaatagagcaagactccatctaaaaaaaaaaaaaagaagtttgtctcagtacaacatgttgttctctggggactcatcctctctaaattatccctcaagacagaaaatctgtacagacagaaagggggtgagggcatggaagttttttttctaccgtcttgactctttggtcaggctttccaaggctcagctctgtcctttggtatcctgtgtttgattcccagcactgaaggcactcagtcagtagttgggtgggtggacagacggacacgtgagtggatggatggatggacacatgagtgggtgggtagaggcatggtcaatggatagatagaagagtagctgccatgcatgagggattgttgagctttccatagctactgaaacccagctgctgctcctgcctttctgccaattgggacctcactgtttggccttatttatttctatttttatttttttattttttttgagacggagtctcactctgttgctcaggctggagtgaagtggtgccatctcagctcactgcaagctccgcctcctgggttcacaccattctcctgcctcagcctcccgagtagctgggcctacaggcacccaccaccacgcctggctaattttttatatttttagtagagacggggtttcaccgtgttaaccaggatggtctcgagctcctgacctcgtgatctgcctgcctcggcctcccaaagagctgagcctacaacagtaggcatgagccactatttttttttttttttttttttttttgagatggagtttcactcttgttgcccaggctggagtgcagtggcgcaatctcagctcactacaacctctgcctcctgggttcgagtgattctcctgtctcagtctcccgagtagctgggagtacaggtgcatgccaccatgcccggctaatttttgtattttttgtagagacagggtttcgtcatattggtcaggctggtctcgaactcctgacctcagctgatctgcccaccttggcctcccaaagtgctgggatgacaggcgtgagccaccgtgcccggcttgtttggccctaaacacttgattaaagccttaggtttttggggtgatggtaaaatctttgtggggtattgagactgcataatgctgaaattagagctaggacccttttaaaaggatggggattgcagctttgtttactgggatgtggagattgtggtgtcaccctttttgcctgtctgaggttgccagaactggctgtctccattagacgccctcagcagaggctgcttttcagccaaactgcgggagtcatctggagagtccctcccacgcagcactcgcttcagactcttgttcacattttgatctctaattttggtcagcattgtattggaataagattttttaaaaactatacaagtaatgcataaatataagtcttaagcaattttcaaacaatacacagataaaatataagaccctcttcaccaccccatcctgctcatctcatcgaagctaaccacttacagtcatttcatgtgtgtctttctgaatttttttcttagtgaatttacataagtaagtgtacaggtacaaatatagatacatatagagatgaagatgtaattttttacgcatccttagaatcacgctctgttctgtagcttttttcatagactgtttcttagaaattgaatagcaacagcaaatatagaagcagcaactctcctacctgacgtgtgcaactgggagttggtgaattcctaaaattggttaaggcagaaagccgtaaaaacaagatacacatgccctgagcattttgtaaaacacaagcccattgtcgttcaccagccagtgggccgctgcccagagccatgtcttgactggggtccactccttggaattcaagttggtttttctctcagatcagaaactcctcacagggaggtcacatagaggtggactgagaagtcacagaggtagactgagctcacacagaggtcatggagaggtggattgaggtcacacagaggtcacggagaagtggactgagaggtcacagagaggaggactcagaggccacaggtcatggaaaggtagattgaggtcacagaggtcacgaaaaggtggactgaggtcacggagaggtggactgaggtcacacaggtcacaaaaaggtggactcagaggtcacagagttggacaggttacacagaggtcacacggtggactgagatcacggagagctggactgaggtcacacacaggttatggagaggtcgactgagaggtcacacagaggtcatctaggggtggatttaggtcacgcacaggtcacggaaaggtggactgagaggtcacggagaggtggactgaggtcacagaggtcacctagaggtgaattgtcacacagaggtcatgttgaggtggactgaggtcacacacaggtcatctagaggtggattgaggtcacacacaggtcatctagaggtggactgaggtcacacaggtcatttagaggtggattgaggtcacacagttcacggagaggtgggctgaggtcacacagaggtcatggggaggtggactgagaggtcacctagaggtggattgaagtcacacagaggtaacctagaggtggactgagaggtcacggagaggtggactgaggtcacacagaggtcacctagaggtggattgaggtcacacagaggtcatagagaggtggactgaggtcacacaggtcacagagaggtggactgagaggtcacacagaggtcacagaaaggtggattgaggtcacacagaggtcacagaaaggtggactgaggtcacacaggtcatctagagatggattgaggtcacatggaggtcacggggaggtgaactgaggtcacagagaggtcacgtagaagtggattgaggtcacacagaggtcatggggaggtggactgaggtcacaggtcatgtagagctggatttaggtcacacagaggtcacagggaggtggactgagaggtcacggagaggtagactgagaggtcatggggaggaggactgagagcttctgctctgagggcccaaagtgggaggactgcacagagctggggcagtggagagaggggtggccatctgaggggaccccaggatagtggcttttccagggatgggacatcagcttgtgccaggccagtcaccaaggcaggagggcacagcacattttctgtaaacagcaggtgtcccttggagtgtgaggtgtggtcaggaaagtagcaggatgtgcagagtcaccacttcttgtttgtcactgtgtcctcccactgtcctacgcgggctcgagaggctggggtggatgcttggccaggccccacctggcctggctcagcgcctctccgtgtgctggcccttccgtccttctgttcactcacaggcctcagcgttccttcaaaactcttttcccagggccaccactgtacgttacaaagggcggaacctgcggatcaaagcgcccatgtgccgggccctgaagaagctgtgcgatccagatggtaagtgaatggggcgctcccgggaccagaggcggtgcccatggtgtcccattcaatgatgggcaggctgagctaccgggttgctgccacagttgctttgtgtctgaccctgcttaatcccagggctgcacatggaccactcttgaacttgaaatgctccctacgaccactcagtcaagttgagctcagagccatggcagcagtcagcagagtggtcggaggttgtcaggatcgagtctcctatggcctctctggaccagtctgtggcctttgcaaacccctgagcagctacattggagtttcttcttcgctggggtttctctgctctccttgcctctgtttgcaaggccatctgctcacagctgatttcactggtttttctggcccagcccttggttttctaccttaaggttgggctgcactaaactttcatggttcttctgcattgcaggcttgagtgatgaagaggaccagaagccagtgcgcctgcctctgaaagtccctatagagctacagccgcggaacaaccacgcctgggcccgtgtgcagagccttgcccagaacccacgcctcaggtaacatggcccttggcacgcagaggggtcccaactgcttgagcaggactggaagcaacgtgtgtgagtttccctcaaggaacttccaggagaagcaggtccacccctatgctctgtcatcacacgaggacgcagcagtgtggaggcgactggagtccagggagcactgggctgcagtcctgtatctgggcagggatcgcccaacctgtgttcaggccgtggaggggatgtcgcggtgagaagaggagctgcagagccttcctttcgtcccccactaaggcccatacagttcctctcccacccgcttcttggagactcgtggctcgcatatgcacaaggcgccatcgtggaaatggaccctttttcatttgtacattttaaaaaatgaggtgaccgggtgcagaggctcacgcctataatcccagcgctttgggaggccagggcgggtggatcacgaggtcaggagatcgagacctttctggctaacgccgtgaaaccccatctctactaaaaatacaaaaaaaaaaggtggcaggcgcctgtagtcccagctactcgggaggctgaggcaggagaatgacgtgaacccgggaggcggagcttgcagtgagccgagatcgcgccactgcactccagcctgggtgatagagcaagactctgtctcaaaaaaaaaaaaaaaaacaaacaaaaaagaaattgaggtgactgggtgtggaggctcacgcctgtaatcccagcactttgggaggccaaggcaggtggatcacgaggttaggagtttgagaccagcctggccaagatggtgaaaccctgtctctactaaaaatacaaaaaaaattagccgggcgtggtggtgggtgcttgtaattccagctactcgggaggctgaggcaggagaatcacttgaacgcaggaggcagaggttgcagtgagccaagattgcgcccctgccctccagcctgggccacagagcaagattccatctcaaaaaaaaaaaaaagaaaaaattgaggtaaaattcacatatcataaaatgaacttagcctttttttattttttcttttttttttccgagatggagtcttgctctgtggctcaggctggagtgcaaatggcgcagtctcggctcactgcaacctccgtctcccacgtttaagtgattctcctgcctcagcctcccgagcagctgggattacatgcgcgtgccaccacgcctggctaatttttgtatttttagtagaaacggggtttcaccatgttggtcaggctggtctcgaactcctgatctcaggtgatctgcctgcttcggcctcccaaagtgttgggattccaggcgtgtgccgccgtgcccggtgaacttagccatttctaagtttgcagttcaggggcatttaacacgatcacattgttctgtggccaccgtctctgtccagctccagagcattttcatgacgctagaagaggccctgtgcacctcagcactcactcctctattctccattctcaccctcccacggccgccggcacctcccagtccgccttgtgtctcagtggacttgcctgctctgaacgtttcatagaaacggaatcacacgcagaggcctccgggcctggcatctttcactgggcgtgatgcttttgaggttcacccatcatagcgcatcagtacttcattccttccgctcatgtacttctccctcagaatgtattaacactgtccaggcccgcccgcccttgaagccagaaggagctggtagactaggcagaggctgtgcgccagcacccacgcccacgccctggcggagaccttttgctggcaaagaatacttgggatctctgtgttgttttctttagctctgtgtgaatctctggccatcgcagctggaaaggctggtttttagccacaggagccaagggccctgcagacgcccgctcccgggtgcctctccagaggtcccttgtctcttttggcaccctcctgctgtaagcagcctcgggactcttcagatggtttccttcctgttctgcgaacctcacttcctcctgtctgtcgtctccgtaggatgatcgtggagctacatcgaaaggtctccagcctcatcgaattcttgaagcagaagtgggcgctccatgaggtgcgagttgtatccttttccagctaaagcaaaccatccaggctgcgctgcctctgctgcccagagatggaccacgcctccctgtgcctgtcatcgtcatggtccccgtgggcagaacagccatgctgtgacatggtgtacatctggaaccataacctggagccccttattccctgggtgtggagccccctctgtggccttgcagtgctagaactcagtcacagccagccctccacgatgtcagtggcctgtgtctggcccacggggtgtggccaaagcattcctaccagcaggttgagcaaaacgaccaagggtcagcccagccttcttcacatccatggctggctcccggccctgcctgctccccacataggcgtggtgcgtgtcaggtgtgaatttcctgaaggtactaagtgcccgggtcagcattgttgggtagtggtgtgaggaaagccacgggtggtggcatgatttataccctgggggatgccagtggggagcgtggctcgtgtctgtacccatgtgcctggtcagcatcccgacctcagtgctagccagtgtgggccttccttgacgggcactcagcggaagacactcgaggagcggcagctgcaggactcatgctccgcaccgatgcaggagaaggtgacactgcacttgttcccaggcgagaactgtacactgacaccgctgccgggcgtggctcgcgtggtgcactccaaggccttctgcacagtgcactggcaggagggcggccggtgcaagcagagtgccaaggacgcccacgtgctgcccccagcccagatcctgggcatccagagtgggcagggcacggcccggggccaggtgaaatgcccgcggagcggagctgagggcaagggtgtggggcggccccctcctgcggctgacgccttgcagagctccggagagagttcccccgaaagcgcccccggggagggggctgccctaagcttgagcagcccggacgctcctgacaggcctcctcccaggcaccaggacactgggccatgtcttgagaagacccctgcagaaggcagggacagtcccacccgggagccaggggccttgccgtgtgcctgtggccagctcccagacctggaggacgagctctcgcttctagaccccttgccccgctacctaaagtcctgtcaggacctcattgtccccgagcagtgccgctgtgcggacacacggcctgggagcgagcagccccctctgggcggggcggcctccccagaggtgctggctcctgtcagcaaggaggctgctgaccttgctcccactggcccatccccgaggcccggccccgggctcctgctggatgtttgcactaaagacttggcagatgcacctgcggaggagctccaggagaaggggagccccgcggggcctccgccgtctcagggacagcctgccgccaggcccccgaaggaggtccccgccagccggctggctcagcagctccgtgaggagggctggaacctgcagacctccgaaagcctcacgctggccgaagtctacctcatgatgggcaagcccagcaagctgcagctggagtacgactggctggggcccggccgccaggacccccgccccggctccctacccaccgccctccacaagcagcgcctcctcagctgcctcctgaagctcatttccaccgaggtcaaccccaagctggtgagtgggttggagcccagcccctctggcggcccaagggaagccaggcccagccttggagggctccctgctgggtagctagggccagcacggttggggtccagatgagagagacagggtcctgtggcagggggccaggagccttcaggacctcaaggaagtgggagaggcagggacccaaatggtccgggagacagaggctctccacagactactttcctctccctcgaggagggatcctcgggcacttgatgagtgtccccacttacgtgcacggttccagaagtgcagtgatgagtggcctgggtgctcccttctgtgtgggacatggaagaagacggccaacaggcaggcagtaccttgtgagccgcctcgtgttcctgggagtctgccaagcccaatcatgcagctgaagggacagtgtgcacaggacccagggtgacagagtgaggcctggagccgagctagccttctggcttatctaatcactgttaacaggtttccacagagggaacgatgggtgtagttcttgctctggaaagaccatcccagctgctgtgcagatgtggcaaagtcagaggctgtcacagaagagcagggatgcggtgccgcagcagaatagtggagctggggaccagacaggacggtccctgcagggtgtgggtggaccctgagcctagggaagggtcccttaccacagggaggccagttggtggagccgacagatggggtgcagaaggcactgctgccaggagtaatcctaccccacagccccaagtccgataggatctctgggtgcaagagagcaaggtcccacggcaggtccatcctgaaatggcacgtttaggggctggcgagctgctggacatgggcgaggggctcaaaggatggactgggcaggagctgcaggtcactgtggaccccttagcgctgtttcatggtcagaatgtgtgtgaggctcacatgtccctgtgctggggggactcgggactcgggcgctcacgagcccccacacacccactgctccacacaggccgtcttacagcttctgagtgatgctcacttctgcctgcattccccacgcctcccgctttttttccgctcccacccccagccggtgcagggcttgccccggagagttggtccatcagcaggtggcaggaatgtgcagatttgcctggggagcatcaagggggctggaggaaagaaagttcttccaggggtggtggagactgagcccaaccctcaggcacctctgaggccaagcctgagggtgaaagtggctcgggggtcgcatagcagggacaccagggtgagtaagcggggaccagaaagacagtgtctttagaaggcttttcaggtttggcttttggtgggctcatgggaggggctgaggagagacatggcgcctgtgtttgggtgccccagggaaggggccagggtgggctcctgagagggcaggcagcagttctgggacacagagcaggtaggaatcccacatggaaaggcatccccatcccctgggagctagttagggaggctgacttggggtgggcctggcagactggacagacagacagacaggtgcctgatgcagctcaggtgtggggccaggtggccctgtgctgtctcttgcctggtggagctgtgacaagcaccccaaaaggcccgagccccagagatcaggagatgccggaggctgctgagccgctgtcgcaggtggaatgagtagcataggaagggtcatgaggtgggaggggtcctggggaaagcctgtagtatggggctagggcctgaaggctctgagtgagcagacgggcagggctgtgctgagagcacggggtggagggcttcttagtccatagggaggttgccccgggtgggatgtgtggggtgttcaggagagtgaggagaaggaagagagccgagaggctggggtgctggccgagtcttcccagcggtggtggcgtttctgtggtgagccagacagggaccccaggactcggcagcaggctctgcaggctgtggcgtgggcctgcacatcccctggggttgggctctgtgggcctgcacaacccccaaagttgggcttcatccctgcagagtgctcttcagctgtgcttgtgtctgattctagaaagtcagcctatatttccttcctctgactcacaagcagagaggctgctgcagtctcatgttgactttttaatatagctttgagctcttgacacttgtcacttgccatccggcacctcttcctgcagcctgtgctggcacttcgggctggttccctccctcccacctctgcccgtagcacgtggaaaggtacttgtgaggaagggagtggttttcattacttacctgaccagtgacttttattgattgattgattgattgatttttttcttttttttttgagacggaatcttgctctgtagtccaggctggagtgcagtggtgcgatctcggcccactgcaagctccacctcccaggttcacaccattctgcctcagcctccagagtagctgagactacgggcgcccaccaccacacccggctaattttttgtatttttagtagagacagcgtttcaccgtgttagccaggatggtctcgatctcctgacctcatgatccgctcgtctcggcctcccaaagtgctgggattacaggcgtgagccaccgcacctggccgaccagtaacttttaaaactggcaagctgccaagcgactctggggacactgaggttgggcgtctctggccctggcctttgccgtcatgacactgtgctttctgagctcgatgattttcttgtgcctcctactccagggcacgcaagagccatttctcatgtgctgagtttggacattgtttggcccatttctgtcctaggctctggaagcaaacaccatctctacagcctcagtaaggcccgcccaggaggagcagtcgatgacgcccccagggaaggtggtgaccgtcagctctcgcagcccccgctgccctcggaaccaggcctccctccgcagcagcaagaccttcccgcccagctctgcaccctgctcctcaggtgaggctgtggcagccacactccttgtgcctgggctgccctgatggcacctcaggcttcaggggccgtgccgaagctgagagcacaggtgtgcctgaggccggaccccactggccagctcgccactatccagatgacagggtgaaggtgcagaatcactgcctcctcatggggagggtgatgccagggcttgtcgtgaaggactttggggtcccagggcgtagaagctggtgagaagccagcctttgccagtctggtgactttggggtctgcttcatggggccagcaaaagccttgctaatgtgctgagttggtggttcaaagtccctgagaaggttgttttttttctgtttttctttacatgtaaaacctcagaatagagaatccttcagttaggggaggtgccagtaggttaacacaagtcccggaaagaatgatggagcaatctccaagtccacagtctaccccagctgcgtataggaaataatttaaattcagggatcataaattgtgttcctggtacataaaaccccaagacaagcatgaacagtttcccgaggcatcagtttcactggctttcaacccatagtatttttagaataaagcagagattatcatggttagaatggtgaatttttaagtgtaaaaatggtgagttttagactgggcacagtggctgatgcctgtaatcccagcactttgggaggccaaggctggtggatcacctgaggtcaggagttccataccagcctggccaacatggcgaaaccctgtctctactaaaaatacaaaaaactagtctgacgtggtggtgcgcgcctgttaatcccagctactccgaaggctgaggcaggagaatcacttgaacccggaaggcggaggttgcaataagccaagatcgcgccactgcactccagctcgggcaacggagcgagactccatctcaaaaacaaaaaaaaacaatgagttttcaacgtaaaataaggcccggaacagtggctcatgcctataatcccagcaccttgggaaaccaaggcaagaggatcacttgaggccagcctgggcaacatagcaagaccccatctctacaaaatataaaaataaaaaaagtagttgaatgttggggctcatacctgtggtcccagctactcgggaggctgaggtgggaggatcacttgaacccaggagttcaaggccgcactgagccgtgattgtgccactgcactccagcctgggtgacagagggggccgggtgagaggtcctggcctcctgggtgacggagggggccgggtgaggggtcctggcctcctgggtgacggagggggccgggtgaggggtcctggcctcctgggtgacggagggggccgggtgaggggtcctggcctcctgggtgacggagggggccgggtgaggggtcctggcctcctgggtgacggagggggccgggtgaggggtcctggcctcctgggtgacggagggggtcgggtgagg[145 bp omitted]gtctcctgcctcagccacccgagtagttgggattacaggcatgtgccaccatgctcgggtaatttttgttttcagtagagacagggtttcgctatgttggccaggctggcctaccatgaattcacagggtgatttacagcagcactgacagtgatgaaaacatttagcagggtcccacaatactaactctcaaatatttcctgttcttttacctctgggtctgttttctaaaaactagagatttacaccagggagcagcaagctataggcctgcagcccagatccagctcactgcctgctgtttataaataaagttttattggcacacagccacactcatttgctcacctgttgtctgtagttgctattgtgcacggctgagttgccccagagacggtgtggtctacagagtggacattggttttctggcccttcaccaggaaagttgactgacttctggtctcccctggagacactgaaggctcttctagccctggaacatctttggtgtcttatctgcccttacccctgagcactgagcgaagtggtgaagtgcttttgtcctatccaggagaccagtggtctgctcaaaatgggaacaagaatttcagtgagaaggatagaaaatcagtctttatgtgggactgagatagaggtgtctcctttcaaggcagccgaacgggttgccaagagaatgtctttctgactttcttcccaacggaattccgtgaccctggacctgttgctaggtgaatgctgtcacactgattctctcctctcctctcccaggtttgagaaaccctccaagacccctcttggtgcctggtccctccagcacaggaagcaatgactcagatggaggcctttttgctgtcccgacaaccttgccacccaacagccgacacgggaagctcttctctcccagtaaagaagcagagctgactttccgccagcatctgaactccatcagtgtgagtgtgtggggccgggccgcccgcgtgcgagcgtccccgtggtctggagagtgcaccttcaggtgccggacgctgctcccttacagatgcagtcggatttcttcctgccaaagccccggaagctgcggaaccggcacctgcggaagccactggtggtccaggtcagggtcttctcaagtctgaacgtgtggcctcgtggctgggccaaccaggacacagggcttcttccctctctcacattttcatggtgtaaaatgtgggaaattcctgccccttccttccctcttgtgagtagggtaaaaatacaagtaataacagtgaacttaatggtacccagaagtaaaggtaatctttcaataacatggaaatccacttgcaaaaaagacaattatagggattcaagtccaaagaatgtcccagattgggatgtatttatggaatctcaacacctatttataaacatttagtctgtgggagcagttgccagggcatgtgggtcagccagagcccaggcctctcatgagctccccaggagtccccgaggatgccgtatgcaagcctgggggacagccagggactcagaggcacctcagaagaagagcttggcattctgacgcataaaaatacagaaagtgaggtgggaagtctgaggtaattatggcctcagaaatgtatggatgtgtgttattttggattcatgcacaggtttccttttgttagactcttagaaatctctttctcccttgagattagtatatttacaaatgagacattgcatgaacggtcttaggaagaaagtgcctgctaaatcttaggtgttctttgttcaaactaagatcagggttgaaaactatggcccagggaccacttccagcctgactgttgttttgtttaatttaaaacaactttatagatagagaattcacatatcataatgtttgcccatttgaactttatgactcagtggtcacaaggtgtacgacgaccatcaccatggtctaatcccagaacgttaccacccagaaaggaaaccctgctcctatgaactcacgttgccttctcccgccagcccttggcaaccacggatccgctttctgtctctatggatttgtctgttctgggcatttcctataaatgggatcatacaatttgtgttcttttccacataatatttttgtaaataaagtttactggcacacagccgtgattattcatttctgtactatctactgttttccacacgggcaggtatatggccccaaaacctaaaatatttcctgcctggccctttacagaaaaagtgtgtcaatctctgctacaaaaagtgtagcctttggagtgaaagctcccgctactaggctgcagcctactgctgtccctagtagtgcctcctctctagtctctccgacgccagtgtcctggggcatttcaaagggtcagaactgcagcggcacccccagaggcggaagcgcctcagacacttgtaggtcgagagacacttttttgttcatgttttatctggattactagcagtttcagtgatgaacacggtttctcagatggtagtccttgtcactcaaacctgccgtagcacattcagcctaattgttcacacacaaaagccctggaaaggagcacttcatgccctttggtgcctgtgtgttacaagcagtgactttattttactcaccccatgtgtgaggaagcccagaatgggaggtgtcactcctaaaagtccatgtccagtggttataaacaggtttgtataactagttgcattccagtcaaatccagaagaaagttctggattaaaagtggatcaggccaggcacggtggctcgcacctgtaatcccagcactttgggaggccgaggcaggtggatcacctgaggtcaggagttcaagaccagcctggccaacgtggagaaaccccgtctctactaaaaatacaaaaactagctgggcgtgatggcgagtgcctataatcccagctactcgggaggctgaggcaggagaatcacttgaacccaggaggcagaggtttcagtgagccgaaattgcaccactgcactctagcctggctgacagagcaagacaccgtctcaaaaaaaaaaaaaaaaagtggatgactctgacattcctccagtttccctggggagggtttgattacctgggtttgtttgagagaggacctaactggagcttggggtacatgggtcctaactgtctgagcagtcccaggtaccctgtgtcatcggctctggaaaaagccccacctggctatgctgggcaccctcttacttgggacattcctttgtaactgggagtgattttttggtatgggagtttcatcaccttgattgttgaccattttccccacagagaacactgctccctagaccatcggaaaaccagtcccacaacgtttgttccttctccatcctgtctaactcttccgtaactggtaaggaccctgagcttttctggggtagcttgtccctcctcctcacaggagggccttggctttggagacaatgggtgcttatttccatggcctatcttcaggcattcctttgtccattctaccgacaaatacctaatgtgccctatgtgctgggctgcaggctgcggtggcgggcgaggcagctagtccagcgaggcagctagtccaaagggtgcccttcgtctgtggcctcagatggccctgtgtgaggcgcttggcttggttagagttgtgtctcttgtctgctctctctgtgtaatgtcttgtcagccgttttatgggatggatgtgttcttggggtgtatggattatgcttccatcagtctgtacatttagtgggggccttggctccttgcggtagatattacacagggagaagcctctagtgaaacacatactctgtgacttcccttttctaccagtgttgacttccacgtctctcactgacttattgcaagacccttaacagctgtcaattgctttttctcttgcctacttgtcaattttcaactgtgggaagcctggcaagataaaaccaaattgcagtggcagcatcttagtccagaatctgatgctctgactgccctggggcctgtacctcagcttgggggcttgtcacccttcaagagccatttccgcaggatgacagtggtgaccgcagccttccagtagctcctgggaggcacagtggtgggtgccagagcttgtgtcacgttgggggcctgtgtgacctctgactcctcatgttagcatttggaatgttcagtggcttccagcttggctcggctcccacactcccaacagtggctgtaaaggaagccccctgcggccacatcctgctgtgagggcatggcgggcgggctcgacatgtctgcttttgccctcgccctcgcagggagaggttcgttccggcccatccagtcttctctgaccaaagcagctctgtctcggccgatcgtgcccaaggtccttccaccccaggccacgagtcacctggccagtaagtctgtacctgcatggccacagccactgagtgagcctctgagggatgtttttgtgaccaggttttttgaatgttttcttctccaaatcataatgtctcattacccttcaccaagaacatctaagcccttggctcttgcattgacatgaggtgcgagggagaagctgttccccgagccctcttgggacatcttatgggttgtcagtagagcagagatgtgcagcgtcctttttgttgccaggtgctatcgacttagcagctacaagtgccggcatcctttccgggaaccccctccctgccttggacaccgagggcttgtctggcatctctccactgtcttcagacgaggtgacgggtgccatctcggggcaggactctactggaactcaccaggatggagacaccctccccaccgtgggggtgagtatgtttagaagggcttttcagcattaccaccaacttctggtgtggacgccaaagccatggggctgagatcacgctggactccagctctgcctttggaggagagtctctggaccaggggtgccatggcataagcaaactctgtgtagtacagagcaggagaggcctccggagccactgacgaaaggtggggacaggcttgccatgtggcactggagaactcagagctaagacggtgtggaaacatagctccatctgagagtgaccataaccaaggtggcagcccacagcgctgtgctcggacaccactgagcatctctttcatctgggaagagagcagcctgtatggccttggccattgctcctttccaaggctctgagcacctggtttctctggcctcccacggccacttcagagctgccccaaggagggtggggtgggctgatgctgttaagactccagggagcccagccctgcctgccacaaggttgacttcctgataggactttacttcactcttggaagcaacaaaaaattggaagtacacggtccacacctgaaagtagcctttcagtgttctcgaccttagacccctgtccatttactgtccctctgctgttaggaggccagggggatggaacgcctctttttctggaactctgtcgcgggtgagggtatgggtggcatctggtgcaccctgcggctgctcatgggcgtgctcttcctgcagggctccgacccatttgtcagcatcccttcgaggcctgagcaggagccagtggcagacagtttccaggtagagtgtgctcttgggctgctgagcaaagcagctgccccaggactccctccagtgccctgagctgccacctgcagtcttggagtggcccggcttctctcctagactgtgcagtggctttgctgttcttccacctgctgtgccgactgcccagggtggataaatgaatatggctgtccgccacctcagacttccctcctcccctctccaaggtgggctgtttcagacccagctctggaagaacttagcgctctggaagaactcagctttctgggaggaggaggctgtcagctagtaactcccccagcccccactctctttctggcagcagtcaaagcaggtccaggccactgcagcctgactttctgactctgccatagtgagtgtttttgggagaaataaattccccgagtgtgttcctgagttggaaggatgaggtgactgcagcgctcatcaccctattgatttgcctgcaagctaggagagtaagctggtgtttcttcccttgtcatgggttctgatagacctggttgtgtctgaaaaatacctgtctcccagcagggctcatctgttctctccttatctgagctgcccaaggcccctctccagaatggcctctccataccgctgtcctcgtcagagagctccagcacccggctgtctccaccagacgtctctgctctgctcgacatctccctgcccggcccacctgaggatgcgctgtcacagggcgagcctgccacacacattagcgactccatcattgagatcgccatcagctccggtcagtacggtaagggcagggcggcctcacagcccttcctgtcatcaggtgttgatctcctgccccaatgtttgccacacttcctggggatattccagttttgtgatttttacgaattgaaaacctgtcacctacaaggtgctgcctgtctccagcagggaccttgcaggtggataaggtacctgtgggacctgaggcagctgatggcctggtaggcttgctcctgaccttcaggcgagacagtggaatggcccccaggtgctcttcagcctggggatcacagagtgttttcctagttgatcttgaacctgagcaggcggcctggggtcttgcacagcttgtgaagcagttgggctgggccctgtgggctttggtctcacctgctgtctgggacaaagctcctgggggcagtggtttgttgttcactggcgcgacccaggctgtgggctgagagagatatgagttcacagtgtgctagcatgtagccttgggcagctcaccaccttgctgagcctccctttcctaagcggtaaattgagaataaggtacagctcctagggctgctgtgggtgccgtgagatgactcatgtgcaacccgtggtggctactgccgtcgccttcactccgctgcgccctgcctccctgcagagctgttctgcggtgctgcgctccttacctgccgagccatgccatccatctggttcagcagggtagagccctgcggccctgctgccttctccgtggtgggctggagaagtgagttgctgttcaccaccccgcaacaaggcgtttctgatctgggatcttggttggcaggtgaaggagtccctctttctccagcaaaactgaatggcagtgacagttccaagagccttccctccccgtccagcagcccccagccacactggatcgcctctcccacccacgacccccagtggtaccccagtgactccaccgactcctcgctcagcagcctgtttggtgagtgtatggggagggctcccatctccttttccagggcagcaggggctggggtctgcgggacactggattctcattctactcaaactcccactaggactgttggcttgttcgcttctcaagtgtttgtatttttctgagttaatatttttgggtgtaatttacatgtaggaaaatgtacacatttttagtgtacagttcaccaagctttggcaagcatgtatagcctggtaacccacaagccaatggagacctagaacattcccgtgaccccagatgctgggttctgtgtgccttcccagtctgttcagctagcccggcccctcccgactgggttctcttgaggggagaaaaggaaactggtgtcttggcactctcttggctcttctctttctgtggtcagtaaggtattcagaagtggatggtccagctgccacctggcacattcttgaatatagatcggagagttcagaggacgtgtccatcctcctcccccactgcccgtttgcccactgggtagcaagtgtggcaggaagggggtgtatcagggaaaggcacaccctgctgctgttgcctgcccagagagagctcccatttggatgtctggggtcttcccgcccacagttgtacggggccagggcttgtggctgggcacatcaggcatggcgggtaccatgcctgacagctctgaaccagttgggcgacctgggtctgggaggtgctgagggacccagcaccctgcaggcgtttccttttgtctcatgtagcagtgcagatgtttggaaagtcacacgtaaatcttgaaaaactggaaacaggccaggcgtggtggctcatgtctgtaatcccagcactttgggaggccaaggtaggaggactgcttgaggccaggagtttgagaccagccttggcagcatagagagaccttgtctctacagaaaattttaaaactagccaggtgtggggggtgcatgcctgtagtcccagcaactcgggaggctgaggtgggaggattgcttgagcctaggaattcgaggctgcagtgagccatgatcaccactgcactgcagcctgggcaagagcgagaccctgcctttaaaaaaaattaaaagcaaagttggaaacaacctgcatgagactagtcacagagaagaaagtatgggggtggggatggcagtgagggtgggagagcatgatgggggtgggggatggcagcgagggtgggagaccgtgatgggggtgggggatggcagtgagggtgggagaccgtgggactcgtggaaaacaaggtgcatgtctgtatgcacgaaggcctgttaaacgagaagagctcgtcacggcgtgttgagtccctcggaagctcttcgcacaagtctggattggggccggggccggggctagggcttgggctggctgcccccagcctcaggacccttccgctggactggtccagaccaagcagggttcagggtgttttcctctggccttttctccgcagcaagcttcatctccccagagaagagccggaagatgttgccgactcccattgggaccaacagtggcacttccttgcttggccccagcttgttggatggaaactcgcgggactcatttgtgtccaggtccctggctgacgttgcagaggtgagtgcattgacctcacagctgcacctgaccaccaaccctcgtgccagaggttgccagcactctcctgcacacctgtgggttagtaagagctgtttgccaagagtagaagaacaggagacagcacgtccacactcaggtccctgactactgagaatggagagatctggggacgctgggccggctctcgtccccacatgcagaatgacagacttagtcatagctgagctctgcaggcctctgaactggaaaccctggtctggggcgcagagcagggtctctgaaggcagccagagccgagtggggatgttacctctccttccctggctgtgaggtgctgaggtgcggggagtgttgtggagggaggagtaaggggtggtggcagcagttgtgttgtcagtgctcccatcctaacagcaggacctttgagtggcatctccctgtcatgttgagctgcggtgcaggggaactgggatgggctctgctgtcctcatgcttctcccacgcccagggtagtgataggaggagtcactggggcaggttcttgaggggaaggcgaaacgtggtttgtgactctccacttttgacgagatgcagcgtccctctttgttggccaggccatctggttgtagccctcaaggcgtccaccacatggtttgtgtggcattcgtgggcaggtcaggcttgcagggtgaagacaggcccgtttcactgtgacgtaaagtgcagagtggcaggtgtgtgggcagtcgggtgagggctctatggacagggagggaactccaggtccaggagatcatccgcatgggcttagcccatgtgaaagtcctggagcagcattccccgaatctagtccccacaatgttgagacattggcaggtgttccttgaggattttgtgggtagatacttgagggacaccctggatccaaaaaagctcaaaacagctgtttctcacggacacctccgctacccagtatccgaatgtgaatcgtgactcttgagatgatgaactcatgggcaggctttggagaattccaagccaagccatgatatgactggaaattttagccaaatatacacatagacacaattaatagcgtagacctccatctcacagtgtgtggcgtttctcaaacctgtttggccccagaatcattattcagggcacaccttggactctgatgtttcccgagaagccagtctctgtctcttcccctgtttgtgcgcatgttcctaagtgctgggctctgtggagatgggcgctgcgtacgtgccctgaggcagcatgctcacgccatgctgttgaaaggacgggccacagcccagtgacaggagccccttggagtcagaaatccagagtgttagcctcaccccaatcagaatttgcacctttaataaaatcctgggcaacagatggcacttgggagtgagtagcagagaaagggtgcagttagtatttgtgaaacgctgcccgtcgcgagtaatgcaaacgtgttcaccttcagaaagagcagatcagcgtttagcatgagattttcccgagagccctccactcagaacgtgagtatgtttctcagcaggtcctcgtcatctggaaggatgggctgaggcatttgtggatgaaagggtctggtggtagggctagcatgaagggggcgggggtggagctgggtggccctgggatgaaacgggtgggagctgctgatggacatacaggggaaggagaattactctttgctctgcttttgaaaacaaattttaatttgtctgacatttcccataatcaaagcataaaatttcatttacgccatagctctattcagaattttccagacttcttgcattcacagtgtcatgcagttcattaagggatatttctgcagggtctgctgtgtgcaaacaatggcccctgtcctcatgaggcttctactctagagcaggacgcagacaataagcgctgaaaacggcacattctacgtatttgctcatgggacaagatcccggtgccgaggccctcccgtcctccgtctcctcagctctgtgctgcctcactcactctgtcatggccaccaccttggtcgtgcttttcagtcaaagcctcttcctgtctcagggaacatgcctgttgcttctttaaaaaggaacgtactccccatgtgtcctcatgtctctgacgggaacgtgctccccacatgtcctcaggactgatgggaacgtgccctcaccacatgtccttgggattctgacgggatcgtgccctccacctgtcctcatttctctgacgggaacgtgcccccagctctcctcatgtctctgatgggaacgtgcccccagctgtcctcatgtctatgacgggaacgtgtcccccacctgtcctcatgtctatgatgggaacgtgtcccccacctgtcctcatgtctgtgatgggaacgtgccccccacctgtcctcatgtctcttgacgggaacgtgtcccccacctgtcctcatgtctatgacaggaacgtgtcccccacctgtcctcatgtctgtgacgggaacgtgtcccccacctgtcctcatgtctatgatgggaatgtgtcccccacctgtcctcatgtctatgatggaaacgtgtcccccacgtatcctcgggttttaccccacctcccgctcaggtcccagtccttggagcaccctctctggcctccttttcccggcactctctgtcccctcactctgcatctgtttctgcaggctgcccccagtgcctgtgtctgctgcatacagtctgtctacctgttgggtgtcttcccccataggtctcatggcgggcggggggaccagcaccctcaccccagccatcagatgtgccaggcacatcataggctctctgcgagcacttatctaaagagtgtgcgggcagacgacaggtgattgtgattctgcacagagccctgggctgccatccctagcttagcttcctgcagcgggagtcgataggagcttctcgtcctgtttcaggacccgccctccactgaagggccagcaggtcgcggtgacttgttcttcctgtctcctcttcctgcaggttgtggattcccagctggtgtgcatgatgaacgaaaacagcattgattacatttctcggttcaatgacctggcccaagagctgtccatcgctgagcctggccgccgagaagctctgtttgatggtggtggaggcggccccgctgtcagtgacctgtcccagtgaccacacgtcctggtggcggatgaagccctcttcgagctagagaaaaatagataagcccagcagccccagaagatggtctgaacagaggcatctccgcacccaagactgtgcaacgggcaggaacgtggtcacagagctgcttccccacgagcagcaggcaacggcgtccaaggagactaggatgagttcttggcaagggccagcgttagaaatcactgtggtactagagccgttcttcaccacgcctgggcccatgttagggtctgcataatgatcccatttcagcctgtgctctgcctcgattgttgtgttggacattccggtggcatttccttctgagacaagggagtatgtgtgccttggtgtagttgctgtgcactaggagctgtgatctccctctctgcagggaggccccagcccctgctgcttgctttctgccaaacctgtgctatgcatcagctgtgccctctgtggactgtaacgggcaggacagttgggtgtggcctgggctcatgcctggtggtgtcacatcccaaggcagcaagagcatggataccgatcacagggctgctgcggagtcgtggggccctgggctggtgcctcccctccctagaggttttgttcgtactcttaacagggagtgggggcaggaagagtcctgtactatgcaggttgtgtggactttacatgggaccctgctaagctggttgaaaatgtttttcttgtgttttaagaattaggagacatggaagaggaagaacaaagtcccctctgtagttggtttccttcctgtgtccctttgcaagcttccaggcgatctaaggtgtcatttctccctcctggggtgacccttaggcgctaatatgattacagcgaagactttcctgataagttctcaaactcgatgtgtgactgtttggcacttgagacaaacctgcctttgcagggaaagtgtctctcacgggcattggtgtgggcgtgcctgacatacgtgttcagtcccttgcatacctttgccttgagacttctgtgtctccttcccatttgggacacccaggtgagggcccagacatctggatgtggtcagacctcaccaaatatatgccttcgtggtggtctccctccttgcgccctcttgggtggccagcgttcctactgcagacggcccaacatccagtctttccccaggacagagctaacaagggcccctttgccttctcatcctcaggagttccaggcacatgagtcaccgtccatccacatccagtgtggcctggagctgctacagaggtgttgggcaggccatgcctgtgccgccatctctcccttcctgcctcatttcatcccccgcagcagccgggattgattgtgctttcctaacccccttggacctactctccctcctccccaccattcctcttcccccacatgtgtggcacgctgcagccctcaaggccagccctggcccctccactgcttctctccccatccacaatggagaaggtgaaaagaggagggaaaggcctttggtgtggacaagcatgtggacgccctccgtcctgcagtcttgccagcccaccacagccactgtagaccacaggcaggccgtgtactgcaccactgggaggacgtggagaggacagtgaacttccaggcaagagcttccttcttttgtctcacgagtttttcttagagctcttgcctgagctggcttccctccttcagacattgacatgagatcttaagcaaacagtcccaaacctcttaggggtgaaaaaagaaacatgccacttgattaggagagagacagcagtgtttgaactacagcatctttacactagcttgtgttttgtgctacgtataccagcttccaaaattagcatctcattgagccagagaagacaaggagatctccctctgggcatctggctttgctgcgtctctagagggttaggataccaggccgagttcaggccactgctagctttctcatactcccacaggctagaccagagatgccaagtcccaacagcactgagctgtgtgcactgtgccagggacaggagggtttgtgaactgcctgtcagggtacctgttagcccctgacaactcagtggggtgaagttttggaggtcagagtctgctttcgtaggctctttagacagcacctaccacttggttctccagcgtagactcctgggagcagccaactgcagccattgccatccagtggggagatgggttagggaggaggacgggctgactcctctcctgtaataaagctgacaagagttctagaggattctgcttctctagtaactagacaggtgatacgcatttgcttgccacattaagggaaaatggtgtcatttgttgcagaaaaacaatggatacattttcttctggcctaaatgaatatttatgtgcaaacataggcaactgttaaaggctggaattttcaaaagatccaaacagagacttcctgcatcttctgcctttccaacagaagcggtgatcgtctaagtatgagcctgtggcttcctttgtgcatttgagcatgctgtaattaagatgagatcagtttcttagaaaaagctttcctgaatccctctgacgttgcctgggatctttctgttgattcgtcttttctggagattgggacagagcatctgtggtccagggaagttagtcctctggcctcaattctgttgtggatgtgcagtgataagcgggcattgcgtgcctcgggggatgcctagttcgtggcttcctggctgttttgtccttctgtgtcttgtagctgtagggtgccagctcagggagtggggtgttggcggcgtttccgcggttggcctccttgctttgccgcacctccaggttctgggcatgagaggccgtggcctcatttctggtggataacctttttagtttaatagcatctttaattagatcacagcattgaattcaaaatttcttctgcaaagaaagttgtggggcataagacaccgggaatgagggaggaggaagacagttgtgttttctctttaaaccttgagctctagccgatgcatttgtcaggaaatacagcactttgtcttaagaaaacaaggaaggaggccgggcgcagtggctcacgcctgtaatcccagcactttgggaggccgaggcgggcggatcacctgaggtggggagtatgagaccaccctgactaacatggagagaccctgtctctactaaaagtacagaattagccgggcgtggtggcgcatgcccataatcccagctactgaggagacttgaggtaggagaatcacttgaacctcagcggcggaggttgcagtgagtcgagatcgcgccagtgcactccagcctgggcaagaagagcgaaactgggtctcaagttaaaaaaagaaagcaaggaaagagtaatttacaacgaaggaaaaaaacccacagcacacccttcgcggctgtcagcgctctcctgatgtcacagtggctgcgtgtccttggggtgggtgaggtgtggggagcccagcccctggccctgcctcccgcgccccgctccccttctctctcttactcggttaagccatagcgaggcctccgctcgtttcagatatgaatttgttttatagattataaatatgcatatacagtgtatgtataaagcagaatgcctgcctttcctggttattttttgtaccatattgtaaattatattatttattctttaccaattttgggaataaaaggtgttttggttatttaatataataagagctgttaaacttctgtttaaatttccagttcaacttgtaaatgtttttattgtgcataaatacatactaatgttgatctaaggactgtcgtttgtgcctgttcttcagggccgcgcgcccatgcccgcagtccctggtcgggcaggtgcggcccaggtgcggccccgcggtcggctcgcgggctcccgcagaccgggcttcctcccgagggcgcggccgtcccagggcccgcccggcccgccgcccaatgcgagctcccacctccgcgagcggcgtcgccttccccaatcggctgcgggcgcggcgccgaccgttcaaagcctaagtcgtcgggggtgggcgtgaggggcggtggccgcgctgagataggctgcggagggatgattggcgtcttggcgcccaatgggcgctggcgggcggccttgagtacctgcgctgggcgggcgggaacggcgcgcggcgagctgagggtggcggcggtcgacatgttccaggtcccggatagcgagggcggccgcgccggctccaggtgcggcgcggggcacacgggaggcgggcggatagcgcgaccacgtggcgggagcgggccagcccagggcgtccaccagccgtgtggggttggggtggggttggggggcagggcgacctcacagaggccctcggggccgccgcccgcctttctgcgccgccgccagaccgaggcccgaagcccgaggggccgctcgctgaggcccgggctgtggagagctgcccgcgaccgaggccgagggcggggaggggcgcccgggctctgggaacaaagctgtgtggagggcgggctgcgctccctcgcgcctgggcgcccgcgttccgtgtggtgcgttccgtggggggtttcctgggggcggggtgtgcccgtgggtgcggcccattttgtctgtgggatgcgtgtccatgttcccgggggggtgtccctaaggggtgtgcggcgatgtgttcgtggggggtgtctggccatgcccccgctcctgtgcgtgtggccgtgtgcccgtgtccctggtgtgtgtgtggcctgtgccctgcccatggccgcgcttccactagttcatgtgagtccacttcctttggaaagtgccagggcgtctggggaagagtcagttctatctcctgggaaggtggatggcgctcctgggcttcgctgtaggaagaagtggattgggacgaagatatcctgactcagctttaatagccaggaacactgagcacacttttcttatgtttttgaacttttaaagcactctttgggtattgggactcgcatgaattagagggacagagcttacaaggtctttcgtgccacttgagcagtaaacttgcattgtgaagtttgggtcttcagatgcctgaggttttctgtatgatgagcccctctgtggcacagcctcgccagagaagtagaagagaatatgtgtgccatgactgttaagaccaatactatattgcttctcagccttttggctatgatcaagtgaagacaaatactatattgaataaatactaagtaaaagaattgctccaacttgctaaaaataaaaaccctttagattggccgggcgtggtggctcacacctgtaatcacggcactttgggaggctgaggtgggcgagtcacgtgaggtcaagagttcgagaccagcctggccaacatggtgaaacccccgtctctactaaaaatgcaaaaattagccaggcgtggtggtgtgtgcctgtagtcccagctacttggagaggctgagacaggagaatcacttgaacccagaggcagaggtggcagcgagccaagataatgccactgcactccagcctgtacgacagagcaagactccgtctcaaaaaaaaaaaaaaccctttagatttgagggagttaggtcagtattcagtaatacttgtaaccaaataattacccgtggcagggtgcagtgactcaacggctgtaatcccggcacttggggaggccgaggcaggtggaccacgagatcaggagatcgagaccatcctggccaacacggtgaaaccccgtctctactaaaaatacgaaaaaattagccgggtgtggggtggcgggtgcctgtagtcccagttccttgagaggctgaggcaggagaatggtgtgaacccgggaggcggagcttgcagtgagccgagatcacaccactgcactccagcctggatgacagagcaagactccgtctcaaagaaacagcccttcatccatggaacagtgattattatgcctaggtctgcaccgatgtgggaccaggagtttaaactagtgctcagagcgaatccggtttctggttcctggtggccagagttttgcaccacccacatcagtggggggagggactgcatccccagccctgtcccagttgtgtgcatttagtacgtttcctttttgtttgtgctgcctggcactggctgcccggtaaatgatggtgtttattatcaccctgagcgacgccgatgtttttatattgactttcacgctccagaagttagctgcacagggccgcactaaagtcatactcacactaccctgggggactggtttctggacaaggtgttgagaaagggagaaaactcttccttttaggatggtgaggaaggaaagccggtctgaactggatgatgaggtatcactggaagcttctgcttggggtccaccagacgctgcacatttgccactcatctgaacggggtcgagtcgcagggcgggcgccttgtaagcgtcacatttagttttgctgtgaagcgagtcaggtggtggctgtaagattacctagccaggttttcctctcctgagacctcacatctctcctttccttgctgagggattgtcttgtgttaaaggggtttcgtaaaagcgttatgctttagccgcgattaacctgaggtcttccttcaagctggaacatttctatttgtaaggaatttaatccaagtttatttctcactgcttctctctaagcctgaccagtcccctcatcctttctgaaactcggggacaaactattagagagggtcaggagcatggagacccccgaggagggtcacacagcttttccctacctctccagtgctgcagtccactccagctgtgtgaggtttttcttctcctgtgcgcttgagtttctcttgtgtgttttgaatatcttcactgaaatatatggaaggggtaccacaaaaggcaaaaaataattgggaagcaccccccactcacattgtgaatttgtccccaaatgtgtgagctctagcgttccccctccccctattagtgtcatagtggtaagtgcctgtagcctagagaaagccacactgcgccattgttgtcgggctgtttttgttgaaaggtctattgaacgctcagttccattcatccgagacccctttgaggcagcccagccctgcggtctgtgtgaaacctgcagtgggacctgttgcctttgtgaccgagatagccgctgccccttgcctggggctgggcctgtgtgcgccataatttctgctaaaaccgtctttggtaccacttttttttctttgcttgttttcaaataaaattcagaaaagcacatagaacaatattaaatattgtgtttccatcaccccaaagtaacactggtcattgcaagtaactaccactcacctcctgcgcccattggtccccattccacatggaggccacagactcaatttgggtttcacctcttccaaattttggagtcccgatggcactaggcgtctgtcacgtcactcacacagacactgaaaccacctgtgcagagctctagctttcctgtttaaacttgaagctcctccggggtaaggacttgctttcctctatctacggcgtctggggaaggattgccaatgataggtgctcgagagatgtgcaagttgaactgaagcaagggtgaaaggcagaggagacaggagactgtgaatgtagggaatgtggggtcgggaaagagtcctacagagcttgcagtcaaggcgagtctacctggaatcagatctgacagtttgtagcaccttgagggcttgagagaaaagccatatttgaaataagtcagtaaaaggaattatagctcatgctcagctcacataagacttgataaattcagttcagttcgaaagattgcaggccttcatcccttatttccaaagagagaactgtagagacccgtgcatgtttagacctgctacactatccaagaaaaatcgcagaattggctgggcacagtggctcacgcctgtaatcccagcactttgggaggccgaggcgggcggatcacttgaggtcaggagtttgagaccagcctggccgacgtggtgaaaccccgtctgtactaaaaatacaaaaaaatagccaagcacggtgacgcacacctgtaatcccagctactcggaaggctgaggcgggagaattgcttgaacctgggaggtggaggttgcggtgagctgagatcgcgtcactgtattccagcctggtaacagagtgagactccatctcaaaaaaataaaataggccggacacagtggctcatgcctgtaatcccagcactttgggaggctgaggtgggcggatcacctgaggtcagaagttcaagaccagcctggccaacatggtgaaaccccgtctctactaaaaatagaaaaattagctgggcatggtggcgggcatctgtaatcccagctactcaggagcctgaggcaggagaatcgcctgaacccaggaggtggagattgcagtgagccgagattgtgccattgcactctggcctgggcaacaagagcgagatttcgtctcaaaaaaaaaaaaaaatgtagaattaggagggctgcgtgattcaaaaatggatatggaagtcagatggccttatggccactctaagagcacctcacctaaaatcttgttaagccacgccctcccacccaccaccctttattttttttccttttggtgaaacaagtcctcactctttcgtccaggctggtgtacagtgatgcaatcatggttcactgcagctttgacctcctgggctcaagccagccttagcctcccgaataactgggacaacaggcgcataccaccacacccagctaattttttgtttgtttgtttgtttttttgagacggaatctcgctctgtcacccaggctggaatgcagtggcgcatcttggttcactgcaagctccgcctcccgggttcacgccattctcctgccccagcctcctgagtagctgggactacaggcgtccgccaccacgcccggctaattttttgtatttttagtagagacgggatttcaccgtgttagccaggatggtctcgatctcctgacctcgtgatccgcccacctcggcctcccaaggtgctgggattacaggcgtgagccaccacgcctggccttatttttgtattttttgtagagacagggtctccccatatgcccaggcgtgtctcgaactcctgggctcaaacagtcctcccacctcggcctcccaaggtgctgggattacaggtgccaggtactgctcccggacagccctttctcatttaagcttggttattggttatttttaaaaaataatttttcttaagtgcacctgtctttttttttctccctcctcaaatcctccaggaaatggcaactgctgacaggaagtttggcatccacctcccccagcctcctgagtggacaggggccctgggcaccacttcagaggtcggccagcacacgcttggtttctggggtacagtagccagcccgtgggtctctgcaggcggagactgaagcactctctgccttcctgctttatagcaggagatctgagaactccattcacatccagtcacaaggagccctcagcgctctttctagatcttttgaggagaaactgttatttttgttaaccaaaccttgagtggtcagtgtttgcaaagctttccagtgagatctaacctcatatcatagtttttgtgtgatgttgagccctgtaatttcaagtatggtcatccttggtatcctgcgggagttggttccaggacccccaggatgccaaaatccaaggatgtgtaagtccttgatataaagtggtgtaatgtttgcatataacctatgcacatcctccatatgcttttaaatcatctctaggttacaaggttacatataatacctaatactatgcacatagttgttacaccgtatcacctggggaataatgacagaaaagaagtctgtagatgttcagtacagatgcaaccatccttttatttctgacattttgatctgaggttggttgaatccatggaagcagagcccgtggatacagagggctgacttcgtttctaaacgtctgggatcacagacagtcccattgcttaggactagtgagagagcatgtgccactcactggtttaaatctcaatttcagtaagcctctctctcaaatgcatttaaaagtttttccagttgttatgaattcagcgtttcaccggtttttaatgtagatagtgctctagaaatagagctttgtggcaattccttattagttcttaagtttaagtttttacaataaaaagtgattcaagagccaggtgcgatggcccacacctgtaatcccagcactttgggaggccgaggcaggtggatcaccccaggtcaggagttcgagaccaacctgaccaacatggcgaaaccccgtctctactaaaaatacaaaattagctgggtgtggtggcgcatacctgtaatcctagctacgtgggaggctgaggcagaagaattgcttgaacccaggaggcggaggttgtggtgagctgagattgcgccattgcattcctccagcctgggcaacaagagtaaaactccgtctcaaaaaaaacaaacaaaagttagccaggtgttgtggcaggcacctgtaatctgagctactcaggagactgaggctggagaa[145 bp omitted]gcgtctgtaaactagtcataccagtattaactaatggtggtatgtgatttctcagtagatgttaagaaaatacttttgctgggtatggtggctcatacctgtaatcacagcactttgggacgccaaggtgggcagatcacttgagcttaggggttcaagaccaactttggcaacatggcaaaaccctgtctctaccaaaaatacaaaaaattagccagctgtggtggtgggtgcctgtaatcccagctactcaggaggctgaggtgggaggatcacttgagcccaggaggcagaggttgcagtgagccaaaatcacgtcactgcgctccagcctgggtgacagaatgagaccttgtctcaaaaagaaaaaaacaaaatacttttaccctgtctagttgtgccaaaatccttgcacagtgacaagctttcaggtctgccatcagtaattggcatgtactctgtgcttgtagggccatgaagcccccaggaggagaatcgagcaatctttttggaagtccagaagaagctactccttccagcaggcctaataggatggcatctaatatttttggaccaacagaagaacctcagaacatacccaagaggacaaatcccccaggtatgggcctttggaaatccttaatcctttggcctccacgattctcttttgaaaatattttctgtttctttatactgatcctttcccatattgtctggttcaggtaatcacttgttatcagagttcttccaaaatgaaaacgttctgatttgtactttctctcttgaaggtgacttgagtagtcttgaattctccatctgttctggagactttggttgaatacaggcactgaggacacaaaagtggacgggggcttctggttcctgccagggagctgctcccaattgttccacggacccccatgagattcctgaaattgcgtgcaaattattgtgcatttaaacatttttcctagggagggagagtgtttttattcagatcgtcagtgggattgaaactcttaacaaggaagaattgatctagcacacatctacatagttcttcagtatttacccaacctcctagtggttacagtaggagggactctttgaaaaaggtttcttggccaggcgcggtggctcatgcctgtaatcccagcactttgggaggccaaggtgtgcagatcacgaggtcaggagatcgagaccatcctggctaacacagtgaaaccccatctctactaaaaaagaaaaaaaattagccgggcgtggtggcgggcacctgtagtcccagctactcaggaggctgaggcaggagaatggcatgaacccaggaggcggagcttgcagtgagccgggatcgcaccactgcattctagcctgggtgacagagcgagactccgtctcaaaaaaaaaaagaaaaagaaaaagaaaaaggtttctcagccgggcgtggtggctcatgcctgtaatcctagcactttgggaggccaaggcaggtgatcatgaggtcaagagtttgagaccagcctggccgacatggcaaaactccatctgtactaaaaatacaaaaattagctgggtgtggtggtgcacgcctataatcccagctactcaggaggctgaggcaggagaatcacttgaacccgggaggtggaggtggcagtgagccaaattcatgccactgcactccagcctgggtgacagctagactccatctcaaaaagaaaaaaaaaaaaaaatagaaaaaggtttctcttggctgatagactgtccagttgaataaccacccagtggaggttacctgagtcgctttcccccgtctgtacaagaggggaaagcatggtctcttccatccttagaaggtttgagaggccgtgcttaggtgtcactgtgtcaggcaggtcatgaatcagagccagatccactcccgacctcactccgttttggggtaccaatatttattgaccaaatgtagaggaaaaaaagcagtagatccagaaactagttttttcttttgtttttagtctgttttgagacggggtctcactctgtcgcccaggctggagtgcagtgtcaccaccatgactcactgcagccttgacttcccaggctcaggtgaccctttttcctcagcctcctgagtggctgggactacgggcgtatgccaccatgcttaggtaatttttttttgtattttttgtggagacagggtttaaccatgttgcctaggctggtctcgaactcctgggctcaagccatctgcccacctcggcctctcaaattgctgagattacagacatgcacccttgtgcccggccgaagctaggtttgctgcttgcctttttttggtctgtttggttgcttttttggttgttagagaaatgagtgtttcttattaagtgactaacattctcgttgtttccggtttatgaatttaggcccagggactcctgcatgtcctttttagcaaggatagcagaataatatatcgcatgcaagatagaatcctatctgagccatttccaggtgtatgaatctgctcatttggcccctactcagcagagtcatgtctggagctgttcctagagcactccatggaaggcaggcggtaccactttgcccgttccacatggtctcatgcccagtggggagcccggccccttgcggttagtgagccagcctctactcctggtcacagtgtgtggtgccagccatcatggctccccatgccaggttcctgcttctcatggtccttctcacggttgttgggagttttcctatctctccagtgctcttggaagacggtttatggtatattatcaagggaagcctgaaagggaaactgctagttgtgttcaccacccaacgagatctggagtcctgccttctttctacacttagtcacacagacctagccccacagccctctagttgcagggcttgattgagaaaagtatgcagaggccgagagtgtgtgtgaccgaccacatcatagccatcgaatgtttatcaattcccattcagtgtttcagtgaatcttcagtagtctctgtgttctttgttagtcacctggtttagatgttccatgaattgttcttcctcttctagcaatgatgaccaacgtctatgaattgttaatatttaccggggactgtgctaagtgctttgcatgtgtatttttcatttggtgttcgctataactaggagtaggttgttttgctcctttcacagaggaggaaacaggcttggaaaaggtcactggcatgcataaatcccaagctagtcagtagcagagctagtcggtagcagaactagtccgtagcagagctagtcggtagcagacctagccggtagcagtgctagtcggtggcagagctagcctttgaattgaggtttttctgactccagattccatgccttaaactgacttcctgaatgtatccactgggataaatttctcaaaatggaattggtagatcagatgatatatgagtttaaaatatggatagatagttccaaccggtttttcagggcattgcctggtgtttaccattcttgtgtatgtgcttatttgcaccagcagtatttatcttttagttttgcttttaaaaacaaatcttgtaggccaggtgcggtggctcacgcctgtaatcccagcattttgggaggccgaggtgggaggattgcctgagcccaggagtttgaaactggcttgggcaacatagcgaggcccaatctcccaaataaataaatgatatttttaaaaacaaaataacacagagcccttggaaatcaaaaatctagcaggaggaaaaaacatctctcgagtttatcttcaattattagtgaatttaagcatgttttcttgcttcaaagctgaatttatttttcaagtaaaatggtaatagacatatgtggtatgactacctagttatgaaggttaaaagcagaggtacattgtttagtacctattgcacgtatacgtggtaaaaatgtttgtggtttccaaaaaattcaggagtgtggtaaccttgggtgagagtgaaggaacacaggagtttctgggaacgggcactgttctcgatgactttggcagtggttacctggtgtctgccttgtagttatttgtgatagttaatgtcttacagacttttctgttatgtttcacagtttaactattttttaaaaatgagtgatgtctttggccaaaaacttcaaattgagttacttttatcttctattttaaaaagctggagtcacattaaaaaaaaaaaaagtcagccgttatagcacagccaggaacattgcagtgggggctgggggttgcacacacagttttatccgccccgtggtcctgacgtgcttgttgacacagccctgcagcattgctgagggcttactcagcaggccaggactattctaaccacgtcacctgagttaacttgtttagcctcaccagtgaccctaggtaggtatgattatttattaccttttttttgttttgttggttttttgagacaggatcttagtctgtcacccaggctacagtgcagtggcaccatcacagctcaccgcctccaacttctgagctcaggcagtcctctcacctcaaccttctgaggagcgggaccagaggctaattttaaaatatttttgtagagacaaggtctcacttgtttcccacgctagtattgaactcctggactcaagcagtcctcccaccttggcctcccaccgtgctaagattacaggtgtgagccagtgcacttggactgtttgttacctttttaaagttaagaagatggatatgaaggaaggttgacataacttgtccaaggtctcacagttagtgagcagctgagcagagactccctgacccaggcagtctggccacaggacactctccccaccgtgctgtgctgctctccctggccaggggtgtcaagcttggggactgtgggtccctgggaggtccatggctgaggttcagaaggtttatcaccctgaagtcatgtgaaaaatgtacacatttctctgcagggcgagtcccgcatatccccaggtgttctgttaccacctgcaaaaggtagacacgcccgcccgaccccccacttgctgtgctctgttatagtcctccttgtcgctgcactctgggcccctagaactggtgtcccagaaagccaccctgctttaggccccgccgcagcagtggggccctcaagcgggtctgaagacgagcaggtgcacagacccccagccgagcctcatctccacgcaagcacacgtgggctcttcatccggttgcttctgtggagcagtgtggattgttaacactaggaattaactgttgaatatgtggttttttcctgtaaccaaattgctgtaactgtacactaaccttgtgtgagaaaagtttgtagtcctgctaaaagctcctctgtctctgcctatataaatgaaaccctaatgtccctacttcagaacactgactccattcctttggagttggtgtttccaggtgggctatactcaagcattacacatgaataaactctctttaagttaaataaatcaatttacaaaatgtaatttttcgagaacagaaaatgcaaaagatcaaaactctgtaaacaaaaaaaggagaccatgttaagcagtgtggagcccctgcatttccccagtcctgtttcttcacacgtgtaggcatcccccacaggtaactgcttttcttcagataaaagcaaataagaacacttccccttttacatgaaaacactgcatgctatatggattgtttgcacccttgtgttttcactggatgatatgtatagatacctctttatcattgcatagaaaatagagttgacatgtttatttccatcccagacactgttgtaagcatttgacatatgagctacagtaactcactgagctttcttccagtcctgtgagggagttcttttattatccccattctacagatgaggactgtgggacacagaaaggccaagtaacttccataggatcacacagcaagttagcagaatgcatcttctttcctcttagattataagttcttggtgcaccagggccatgattttaatgacaccaacctccatttagcatagcactttgtcaaaagtgggtgcttggtgtctgctgagtgaagagatgatcagttggtcccacagggtagccatctttctgtggaatgttaggcacgggcatttatgctgagcatctagcctttagtcacctgctactaggaagttacctcttagacgcacattttcattatggcttatcaagtcacttatagttggcaacaaagatgttacatgtgtctaatttgctgacatatctagtcactggaagtaccagccagaatgaggtcagaagaatgactaataaatattttcaggatggcaggtttcccttgaatagggcatgttattaaattcagaactcttatctgtgtgacttaaacatttagctgtttatttttaatctactgaagaacttttcatgggttttgtgagcagacacttcaacaggaaagcatgaaatgttcagggttaaagaaattctagagggaaaatctgcagtttgatgccatctcacctctagaggccagcctagatcagctcagttctagacataagggctgcaggcaggcccctgatccagccatggttttcaggggtttcatggatcttcaggggtttcagtctgagcatcctgccctgttggcctggagctcagggctggcactcggggttcctatgagaggaggtctccaaagcactgcgggggtggggtggggtggggtccggtggacgtctggttgctcagtgttctgtgatcgtttctgcagggggtaaaggaagtggtatctttgacgaatcaacccccgtgcagactcgacagcacctgaacccacctggagggaagaccagcgacatttttgggtctccggtcactgccacttcacgcttggcacacccaaacaaacccaaggtatggactgcattcagacgtgacagcgcagcagcgggtatgccaggtgctctttccaaaaaggctccaaggcagatgcgacatgtttttagggagaatcatggtgggtgccgtagattatcctggatgcaagcattagtcatcgagtttggaagttcccctgagtcacccaggaaacagtccagccttgtgctgactgaagccgtgggggaagctcttctgtgctggtggcggacgcccactgcagacgggctgtggcggctcctcactgcagtgctgcggggcgcggagaagcggtggggagcggaacgtgccgcagacgagctgggcccttgtccgtcttccactcttcctgtttcaccttgcagaggaaaagtgacagttcttttctgatgggcttttccccgcacagtcaaggtcctcggctggttacctgtggagattgtcagcacttgactgaagcgtagctgacgcctctgacccagtaatggcatcagtaggataagacaagtggcctggaaaggagaggaatgcctacacgatgcgacctcgggcatggccttagcagggattgatcagagctgcagcctccctgggctatggtggagggcttgcctaaggccagtctcggctttcgtgaggaccagagcctgcactaccctagcttggacatttgtttgaatggtggcagaacatttctagggtttactgcagccaccgttcatcagtaagaaagaccaggatttattactaacataattagcgatattttttcatctattcacttttctaccttttttgtggttaaaagatatggtctggttccttaaagtggaaaattcttaaccatttctggagttacttaacgcctagaaaactgctgcatgtttattggtttatatgctggaagatggcccattgcagaattaaaatggaaatgtagacagaaaggagaggacatgagtggatgagggcattgatcgcggccagcctggtttggattgccctacatctctcttgtgctggcatctctgcagcgacatctctttccagtgtatagagtcttatataggacctgttagactctgctgaggtttggtcgtgttttttcgttttattttgttttttctttgaaatagagtctcattctgttgcccaggctggagtgcagtggcacgatctcaactcactgcagccactatctcctgggttcaagcaattctgcctcagcgtcccgagtagccagtgttacatgcatgcaccaccacgtccggctaatttttgtatttttagaagagacagggtttcaccatgttggccaggctggtcttgaactcctgtcctccagtgatccacccgcttcagcctcccaaagtgctgggattacaaatgtgagccactgtgccctgccatgctgtctgagttattttcaagagagcatctatttgggaagtatctttgggggctttactacaaggtgaactttggcaagaccagaaatgtcccaaaagtcagcaattcctctactacgtaaagcactcgaattagccggacacgagagcaaggtgcttcctgctgagactcacactttccagtgaacgtagatcaggtagaggactgtaggacatcagtacaactgggcatagaacaagtggaaacagagtagagctttctttgattttctaataaagttcttttggtccaggaccattggacatcgctagcatcaccagagaaatgactaattccaggtcagggtcagggaatatacaaaataagcgtagaatatctcgtaatgccagaaaatgaggaagcccttacaggctgctagggtggtgtcagaggacttggggaacaaggtgaagagcagccatggggccagagatgggaccatttgattatcaaaaagtgaaataattgcagtggatttaaattcaccaactgttcagaattcccggcttcctattgatactaaaagtaatgtaatttacgaccttgggagaatgctggaggaccggctcgtcactgcgaaagcgggcagatgacagaagggggcatttagccagcatttcctgcatgaagtgtgtgttaggatagcagctgttgaaagaaagttcccttttataaaagtttctgggatgtaagtgaagaaggaataaaggaattagaatatcactgttttataaacttgtactgaaatcgtggatctgagaaaatgttcatcagtggccgttaacatcacaaaatgagagagaaccaacacttatgggcctgggaatggaaatccaccatgggcccccattgacgctgtttcgtcaaaaaaatcaagctcaaatcagaccaagccacatattaattaacaccacagagctgcgctcagaacaatggcttacataggaaacaacatgacgagaatagagggaggtcctgaggattaaagagagacaagaatgtagccctataagagtcctaatggtgttttattctgtaatgggaaaaaagtcctataattcatatggaatttcatggtaccccaagtatccaaaaataataataattgaaaaagatgttggagctcttacttcctgctctcaaatcttactgcaaagcaacggtaatccaaacagcatggcactggcatgaagacagacacactgaccagtggagtcaagttgagaactgagaaataaagccttccaaagggcttttttttttttcacaagggtgccaagatcatccagtggggaaagaacagtctctttagcaaatggcattggtacaattgcatatgcacatgcagaaggataaaagcttactctttcttacaccatacacaagaatgaactcaaaatggatcgaagacctaaagttaagggcaaaaactataaaattcttagaagaaaatatagggacaaatcttcatgaccctggatttggcaatggaggtttagatatgacaccaaaaacagaggcaacaaaattaaaaataaattgggccgtgcatggtgtctcacacttgtaatcccagtactttggaaggccaaggtgggagaatcacttgagcccaggagttccagaccagcctggacaacatagagagacctcaactctaaaaaaacttttttttaactagctgggggctgggtacagtggctcatgcctgtaatcccagcaccttgggaggccgaggcaggcggatcacctgaggccgggagttcgagaccagcctgaccaacatggagaaaccccgtctctactaaaagtataaaattagccgggcctggtggcacatgcttgtaatctcagctactcgggaggctgaggcaggagaatcgcttgaacccaggaggtggaggttgcagtgagctgagatcgtgctattgcactccagcctgggcaacaagagcgaaactccgtcccaaaaaaaaaaaaaaaaatcagttgcgtatggttgcgtgcacctgtggtcctagttacctgggaggctgaggtgggaagattgcttgagcccagttgttcaaggctgcagagagcagtgattttgccatttgcactccagcctgggtgacagaatgagatcctgtctcaaaaaaattataaaaagcctaggcatagtggctcatgcctataaccccagcactttgggaggctgaagcaggcagattgcttgagcctaggattttgagaccagcctgggcagcatgacaaaaccccttctccacaaaaatacaaaaaattacccgggcatggtggtgcacacctgtggtcccagctgttcaggaggctgagttgggaggatcacttgagcccaggaggcagaggttgcagtgagctaagatcatgcaactgcactccagcatgggcaacaagcaagactgtctgaaaaaataagtaaataaataggtcttcattaaagttataaacttctgtgcatcaaaggacactataaagaatgaaaacaggccaggcacagtggctaacacctgtaatcccatcactttgggaggccgaggtgggcagatcacctgaggtcaagagttcgagaccagcctagccaacatggtgaaaccccatgtctactaaaaatacgaaaactagccgggcatgatggtggatgcctgtaatcccaggtactcggaagactgaggcagaagaatcaactgaacctgggaggctgaggttgcaatgagttgagactgcgccattgcactccaacctgagtgacagaatgagactctgtctcaaaaaaacaaaaaacaaacaaaaaagcctgggcacagtggctcacacctgtaatcccagcaatttgggaggctgaggcaggcggatcacgaggtcagatcaagaccatcctggctaacatggtgaaaccccgtctctactaaaaatacaaaaaaagtagctgggcgcctgtactcccagctactctggaggctgaggcaagagaattgcttgaacccagaaggcaaagggcgcagtgagccgagattgcgccactgcactccagcctgggcaacagagtgagactccgtgtcaaaaaaaaaaaaaagtgaaaagataactcgcagaatgggaggaaatatttgcaaatcatttctgataaggagttactatccagaatacataaagaatgcctacaactcaacaacgaaataacaaacccaattcaaaaatggtagtggacttgaatatacatttctccaaagaagagatacaagcagccaaaaaccacccgaaaagatggtcagtgttattaataactggggacatgcacatcagaaacccgtgagatgccagtgcatgcctgttcggatggtgtgatgtaaaaatggaaaatacgagttggtgaggatgcagagaaactggagccctcgtgcattgctagtgggattggaagatggtgcagtggctgtggatactgccagttcctcagagttaaacaggattaccatatgaccgaataattccactcttaagtacgtactcacaagatttgaaaacaaggagtcaaacactagatccttgcaccaggattattcacagtagcccaagggcgggaatgactcatttgtccatcaacagatgaatgggtaaacaacatgtggtctgtccatacaatggaatattactcagccatagaaaggaatggagcattgacacacgctacagcatggatgaaattattatggatgaaatattacagcatggatgaaatattatgccagtatttaaaaatttgactttgaggctgggcacagtggctcacgcctataatcccagcactttgggaggctgaggcacgcagatcacttgagtccaggagtttgagatgagctgggcaacgtggcaaaaccctgtctctacaaaaaatagaaaaattagccaggtgtggtggctcacgcctgtagtccccactactcgggaggctgagatgtgaggatcgcttcagcccaggaggcagaggctgcagtgagccaagatcatgccaccgcactctagcctgaatgactgaacaagactcttgtctccaaaaaaaaaaaaaaaattgactttgatatttaaggaatcattaatattcgcagttttgagggtgctactgttattttttaaaggatgttttaagagctacatcttgaaatatgtatggataaatgaaatatcaggtttgtttcagaatagtctgtagaggattgggggggtcctgaggtcagatatacaagcatttttgtaaattaaaaggttatatggtcctgattttcattgtccatttgaatgagggtaaaattttctgagtgagtcctgatttggtggtttgccttgttgcaggatcatgttttcttatgtgaaggagaagaaccaaaatcggatcttaaaggtgagcttttgttttctttcccttctcctgagtggcctcattatttctggaagagttgctagtctctcctctgggaatgaaaaggagtctttctttgcaccttctgggccacctgattaaaacgagctcaggtgtatccactgcaagaggattcagcatttgaagaaggctagggtgaaaccctgggacttggttgtcttgctcatcagcctaggcccagggccatggggtcgtctcctagaagctcatctgtgtagtgatgggcagggatcccaaaccttcagtgaactcatgaccaagcatagagctggcagaactaatcgagaagagaggggcacaagagagggatggaggatggggaggcgggtgtctccatggtgagtcaccccgggggagtgagccactgctcaggttgagcggcagacttcgactctccccacggctctttagcctgaccatgggcatcggtttctgcctttgggtctccatttcccttaactaatgaccaagatttgtgggatttcattcacctttgaaaagcccagggtaacagcaacagagcctgcctttgccttgctaagccctcacctaggatgcattccctcgccgcctcatggtcactctcaggggcttgctttctatacttgagatggaagaaatgggagtggtgtctaacaagcaatataaagaaacaattcacttaggaagaaatcaaggagtatttacagtagcaagccccaactttatgcccatttcaaaactgcatctgctaattacagtgagttgttttggtaccagatgaaaagcctgtctatattgtcttctctttcccagttacagcatgaatttcttgcaggttgctctatgacacactttttatttccacagcctgcctgtcagggtcatgggttgcctctaatgggatgttgttctaactttgtgtcccacagctgcaaggagcatcccggctggagcagagccaggtgagaaaggcagcgccagaaaagcaggccccgccaaggagcaggagcccatgcccacagtcgacagccatgagccccggctggggccgcggcctcgctctcacaacaaggtcctgaacccaccgggaggcaaatccagcatctccttctactaagagaagccactgctccacccggagccagaccagaaactcaagagatagggtagccatgttttcatttccttttgcccaaatgagcggggtgggaagagggttagtcttatgtgagcctggctgctcagcgtctcctggccgtcatgacagctgcttggagacccgtgccttccagatggctgggagatgcctctgtggggatgaaatggggcacccctggccatcactcatgtgtagtccaggtttgagaggaactggaaggggggtgagggtggggaggtggggcagggcatggtccttggatcaacagcccgccagctgattggatgtctaggaatgactgaaagaaaccaaaacagcctgtccactgctgctgtgggatggaggaggcgtaagcagaaacactaacagtatattgacctcttagcagaaccgcttccattctggagatcacggctgctaaatccagcatccccacttcattttacccccagcatattgttctgtagtcttttcttgaaacatcttgattgcttttcctcggcagctttcaaaaaaccaaataataatagttatccgtcttctacttcatggaagattgttttggtgccctgaccctctgaagtgcccagttcctgccatctgaaacctcggcctgatctgatctcatgttggaatctgcctgtctttcacacagggctggtcttggtcctttacatgccagttttgcttgtgaattcttgcttttttcctctcatcagccttaagtttaggcgtttgttgttctccagtgatgtagacagttcccttcacaagtcacagttcttcccataaatgaggcccgctgacctctgcgggactttaaaaatctattcagatatttccgagtaagtggcttgtttaaattcttcctgtgtctttctttattccttaattggttggtggaaagaagagatgcttgggaaccttgggttcttaggtttggattctttaataatatctaaaaagctaaattttaaataccagctttacataaatgattgttgactctggtctgtttctgacacctttccagaaaaaagtcaattgttcaggtacaccaaagaggaagaagagctgtggaggccaccctctacaaagctttatagaacttctggatctaactcacaaacaagcttccagaagagactagagaccttaggccaggagatgaaggagttcagtagcaaagtcacacctgtccaattccctgagctttgctcactcagctaatgggatggcaaaggtggtggtgctttcatcttcaggcagaagcctctgcccatccccctcaagggctgcaggcccagttctcatgctgcccttgggtgggcatctgttaacagaggagaacgtctgggtggcggcagcagctttgctctgagtgcctacaaagctaatgcttggtgctagaaacatcatcattattaaacttcagaaaagcagcagccatgttcagtcaggctcatgctgcctcactgcttaagtgcctgcaggagccgcctgccaagctccccttcctacacctggcacactggggtctgcacaaggctttgtcaaccaaagacagcttcccccttttgattgcctgtagactttggagccaagaaacactctgtgtgactctacacacacttcaggtggtttgtgcttcaaagtcattgatgcaacttgaaaggaaacagtttaatggtggaaatgaactaccatttataacttctgtttttttattgagaaaatgattcacgaattccaaatcagattgccaggaagaaataggacgtgacggtactgggccctgtgattctcccagcccttgcagtccgctaggtgagaggaaaagctctttacttccgcccctggcagggacttctgggttatgggagaaaccagagatgggaatgaggaaaatatgaactacagcagaagcccctgggcagctgtgatggagcccctgacattactcttcttgcatctgtcctgccttctttccctctgcgaggcagtggggtgggattcagagtgcttagtctgctcactgggagaagaagagttcctgcgcatgcaagccctgctgtgtggctgtcgtttacatttgggaggtgtcctgtatgtctgtacgttggggactgcctgtatttggaagatttaaaaacctagcatcctgttctcaccctctaagctgcattgagaaatgactcgtctctgtatttgtattaagccttaacacttttcttaagtgcattcggtgccaacattttttagagctgtaccaaaacaaaaagcctgtactcacatcacaatgtcattttgataggagcgttttgttatttttacaaggcagaatggggtgtaacagttgaattaaacttagcaatcacgtgctcagagcttttgcctgtcagttgtgtgtgtcccttatagtcccttcccccacagctcttgctgaaagagtttgccttgttttgttttgttgttttgtatttagccagaggatgccaaaattagtcttctcaaagctttgagtagagtaagtgtgggaataagccagtttttttttttctgtttctgtaacttaaatgaacgggtttttttcccttgtatgccacttgtcctaacatgtccttaaggtgtttaacctgcctctgacctggcttgcaatgcataggtgaggagaagcagagagcttgtcatatgcaagtcctgtcaagaaaacaggtgggcatggtggctcaggtctgtagtctttgggtctttgggaggccagggtgggaggatcacttgagctcaggagtttgagaccagcctagacaacatactacgaccctgtctatacaaaaaaaaacttctctaaattagccggatgtggtggtgcatgcctgtagtcccagctactcgggaggctgagtgaggcaggaggatcacttgagaccaggaggttgtggctgtagtgagtgatgatcatgccactgcacttcagcctggaccacagagcaagaccctgtgtaaaaaaataaaataaaaaacagattggatgtctttcttctgatgtattagctattttcatatgttttctaacatacttaatatccttacaggcattatgtggattcagggtaaacttctcagactgtgagcctgagagttcctctctaggaggctccacaccattctgcctgctagatcggggccagatgagatgaaagtcaacgcttgagaaagaaaaccaacatgcattaactgaaacaccgtcttcacttgttcatccacagggtatagagcgagttccaagaaccaggctaggaaatgacacgctaagtttcctatttctagcagctgccaaggccaccagcaagcatgggaacctctgggagtcacagctcctccgtctccagaggcctggcagtggccaagtctagaaggacgcgggtgccacctggtacagggtgagggtgtgaataacagaccccgaagggttgccacctcgagccccgtgccttgtccaggaatacacaggctcttttgatgtcaggtaactttgccatatgatctttgtggtgtacctggtaggtcacaccctgtgagtgtgtagatgcctcctcccgtgctggctgcttaatttcttctgcactcataatcctgaccatcttgaagatcatcactgaaatactcctgtgtaatgtgtggctacaaagtgctatctaaagatgctctctcaaactcagctcatgaagatgagaggaacatcacagggaactgtgtggcttcttagcaggcatcagggcagatacttagaaattaaagttgaattttagaaacttacattttatattttaatgcccatcttacattttaaggtattttagtgagaaaaagttgcatcccaaatagtatttctgaatctgaaaggaagtcaactcctctgttactagaagttcgttcttctttttttttagacagagccattctgtcacccaggctggagtgcagtggcacaatctgctcactgcagcctcaacctcccaggctcaagtgatcctcccacctcagcctcccaagtagctgggactgcaggcatgcaccaccacgcctggctgatttttttttttttttggtagagtctgggtttcactatgttgcccgggctggtctcaagcttctggattcaagcgatcctccctccttggcctcccaaagtgctgggattactggtgtaagccactatgcccagctgtaagcagttctaattcagcaccaactttcaggagaagaccagttgtatgattccataagtgtcaagaattatccagcaccttgttaaaatttcattttaaccaacttaaagtaacaaatctgtgcaatcatggtagtgataattaatcaattgagttgatggccaagtctgttggcctctccctgtggtagcattgttcctactgtagtgtgctacctcaggaattcaaagggctcaagtttctcaaaggtataaagcagaagctttaaacatcccccaaaatgcaagcttgctctaacttgttcaccaggaagaattatagattacatctgtttgcccagccttatcattttcactttatggaacctcacaactctccgtaacctttatcgcacgttatttgctggagatggcgccatgctcctttcatggattagctgacattcctaataggctggatattttaggctgttttgcaggcttagaaacagagatttggggccaggcacggtggctcatgcctgtaatcccaacactgggaggctgaggtgggtggatcacctgaggtcaggagtttgagaccggcctgaccagtatggtgaaacccccatctctactaaaaattacaaaaattagccaggcgtggtagcacatgcctgtagtcccagctactcgggaggctgaggcaggagaatggcttgaacacggggggcggaagtaacagtgagctgagatggtgccactgcactccagcctgggccacagactgagactccatctcaggaaaaaaaaaaaaagaaaagaaaagaaatggagatttggcaaaattaagtcacttgggatcccaggaaattggaatctgaggctgaatgaaacctcttagtgggatggttgaacatgtatacggcaaattatgttgcaagtggaaaatgtgaaaaacacaatagagcctggcatggtggctcacacctgtcatctaagcactttgggaggccaagggggaggatcgcttgaggccaggagttcaagaccagccagagtaacagtgagacctctgtctctacaaaaatgtttttaaaattggccaagcagtggtggcttacacctgtagacccaactacttaggaggctgaggtgggatcacttgagcctaagagttcaagtgagccctgatcatgccagtgcctccagcctgagcaacagggtgagaccctgcctctaaaaactgaacaacaaaaaaaatcagtagggtgtcagctacgggagttactgtttcggtgcaatcagattaggatgagaggatctgaactgatgagcattgcagtaggtgaaagacggtaagtggccatttctattagcattaaatagtcactgatgtggtttcatcaggattcacaatacatgtgtggctcccaaattgagtttcaaagtcttgggttcatggtgtcccctgcccagcaaaataaagtgcaaatcttacggagcaacacattttaagttcaggcctcaagtacttccagagacaaaagtcctggggacactggctcagaatgggggaaaggggaccctgggccaagagtcaaccaggatgacatgcagaatcagacctgcaagggctgcagatactgtagttatgaggcacacccaacgcttaaagataaatatgtggttggaagtataagagcctattaaaactgctagaatataagaaatcaaataggacaaaaacagaatcattggcagggtgcagtggctcacgcctgtaatcccagcactttgggacgccgagggaggcgggtggatcacttgaggtcagcagttcaagaccagcctggccaacatggtgaaaccccgtctctactaaaaatacaaaaaaatgagccgggcgttaatagcgcgtgtctgtagtcccagctactcaggaggctgaggcaggagaatcgcttggacccaggaggcgaaggttgcagtgagccgagatcgcgccatcacactccagcctgggcgacaagagcgaaacaccgtctcaaaaaaaaaaaaatcggtgcaattaataacccagtggatgggttaaacagattgcacgtagctgaaaagtaaccgaaaatctggactggcgcggtggctcacgcctgtcatcccagcactctgggaggtcgaggcgggcggatcacttgagatcagaaatttgagaccagcctggccaacatggcgaaaccccgtctctactaaaaatacaaaattagctggtctgtaatcccagctactccggaggctgagg[132 bp omitted]tgcagtagggagaagtgggcgaaaggaaggaggccacgctgctgggtttcaggatgagatgggcgttgagggtgcattcacagaatcccgggaggagccagctgagcggggaaggcatcaggagaggggaggcactgagcggggcgcggtgctgtagggaacggaggctcatcagggcggccgggattgaggcgcaggcgctgagccttcacctaagtccgccgaagtgtgcagagcctggagacgggatcgaggtcaccggaagcccacggttgcggggacatgatcaagctacagcgcgctgggggaagcgaccactgccgccccgcggatcccaccggcctggccgggagctccctctgcccggctcacccgcgcttccggcccgaagcccggcttcctctgacgtcacggcccctgcgccccctggcggcgcggctgcggcgggacgcgcgggcaccgccccctccggctggagggcgggacttccggtgagtgagtgacgggcgcagcctcggcagcggcggcggcggagccctgaggcgacagcagctgcgggaggcgacgggctgcggcctgcggaacctgaggcagctggggagggccgggcgcgccggccggatagcgagccgcgctggcggcggcggtggccgcgatgatggagatccagatggacgagggcggcggcgtggtggtgtaccaggacgactactgctccggctcggtgatgtcggagcgggtgtcgggcctggcgggctccatctaccgcgagttcgagcgcctcatccactgctacgacgaggaggtggtcaaggagctcatgccgctggtggtgaacgtgctggagaacctagactcggtgctcagcgagaaccaggagcacgaggtggagctggagctgctgcgcgaggacaacgagcagctgctcacccagtacgagcgtgagaaggcgctgcgcaggcaggcggaggaggtgcgtgggccgcgggacccgcccgcatccccgtcccggacccccagccagccccgggccccggacccaacacccgtcccgaccccagaccccgctccggcaccccggaccgcgggacccctggacccccagaccccgccccgagacccgcctggaccccatatcccccgccccgggacttccccaccccctctgcccgccgtgagacacctccctagagcactcccccgcctgccccgggaccccaccccgactcccggggacccccttttccgcccaggcctgggccctggccccctcctccgtgcccccagccctgaatcttcagccccaaacccgatgtgcctggcgtcatccccggggagctcagcttcaaagccaggcctcactctcccctccccacccacctctgcatgacaattgcctttgctttcgtgcgtgtgttcagtcaaaaccgtttcccgaccccaagtgctacctctgttggctgccattctaaacccatctagaaaaggaatcttttggtgttcttagggggctgcagccgtctgtggatgatgttggagacctttcccttgtccctaatcccgtattttgaaggtctgtgacacgggtgaattgggtggttgatgtaaacacagaacaaggccgcaggcgggctgctcctctgtcagcagaaggaacactcgagtttctggaggtgatgtctttgcccccttggttccttgcttggcgagattgttagctgatgtagccagggctgagaaactccactctggcttctgaggagttaacagtctgagtttgaagcgtttaattctgtgctaggatgtctccataacctggaaatcgcttgtctgtgaagcagttacaagagccgggccctgtggggagcaccacttagcttcattcattcaccgtcagatactgagctcggcctgcctgtgtgtgggcccagaacctcgccctttgtcagaaacaggttcagggaggctggttcccatccctgctttgcctctgtgaccttggcctgtcgcctgcctggggttcgattttccatcaaaggagtgaattgcactaggcgatctccaagcccagaaattctctcattctaggagttaggtaatgctgtttgacttatgaatagaagtgtcttaggaaatgagcttcaattccttttcaattaattcggcttaacacattcttgactttaataggaaaataaaagattgtgtcagtattttggctttttctgaaaccaaggtgatttatggcctagtttggtttaaagcgtgtttataaaaatcataacagtatgttgtatcattcctcctttcctgtggtttctattgcgtttgggcttcgtgtctgtcgcgaggtggttatgcattgattggaatgccccggttccagcaaagctgagttaaagctctcaacctaagggaacgcaaaggttcatggattttggagctcagggtgactataggcattttactgggaaggaaacttgtcctgagaagtggaggggctgaaccaaggtcacccaccccagaagtgcccagccaggatgcagagtgaacccgacaccggcctgggcacttgcttccatgtcaggcagctgcaggcaccggagggctgctccccagaagcctggagtgccagggctgccctcgctcagctgtggagctgtggctgccccctgtgctgggcaccgccctccactgctctcccacactcagtggcctgacctggatttcaggtgggtttctttttttcaccttgtacctgtgtggtcagtatagtggacgagaaggaactgaaaggagaaaatcaagatggacaacgttaaggctaggaattataaccttgccgcttaaaaatgagctgtgcacaggataggcgctgcccagctctgtgcggttcacatgcaagctgctgtgagtgcatctgccctcccccagggctcctgctgaaccaagctggcgggtgtgcgtgtggtttgcaaagctatcacctttagtctgagacccaccattgccccagcgctttagagaagctgcaccgagagcttcgggagccgagccccgaagccagccaatgcttggccagcatggaggctatgattaaacgctaacggggcgcccttggaaagacctcagggctttacaactaaggaagagggctcgatgctgtcaacatttggcatgcctactcctctactgaatcaagcagaccttcatttccaactttgtagaccattgtgccctgtgggtcggcgtcttttctaggcagggacttgtgatcacatagacgtgtgtctgataagaggggagcgggacgtcacacgctgcaggcgtgtcttgttgcagaggagctcctgggtgagctgtcagcagaagctccgtccccagccactctgctcaagaaggcttagtcagagatgggtaacctgagccactgcagcttctgagcagacagaatccgcagggttttataaaaacctgagcagagcagacatccctgttcccatcttcttgccggtcattaccacagtgactcccaatgtgctctgataacaggcagctgagtgtatgagagtgacaggagctagagagggtggggtctcccgagagactgacccaagccgtggagtctgcagaccccagcctgagtgtcagcccggccctcaggagccacacaccctgggtccatcctcttcccctcgctgggctgcagtggccgcggactttgcaagtcagtttcatctcaagatccaagcaccatcactggctgttggttgcctggagaattgtgggcaggcagatgtagcagagtcagggcagaacccttgacgggttctcagggccgccgtggacggcaggcaccggacattgctagccgcctaccagacagtgcagtttctggttgtgcaggctctgatacaaagttttttaaaaccctcaagttatttcccagtggaaaagaagaaggtgggaaacagcagctgaacggggtgggggctggcaaggagcagatgctgcctccacacgcaccgtccggtgcagctccagaggagggccgggcagagccaccacgtttgccgggcttacccgggcagcaaagagcccttctcccatagtgatcaactgcttagcttacaagaggaaaaataaggtgtgagagatgacatgtgaatattagtggtcattatttgccttaaaatcttcttaaccctaaagaaactgctgctggtaacaccccccaggctcatggcaggcagctggagtgggtgttctctcaacaagcccagatggtgatgtttgctgatcattcggcatttgatgctatgtaaggaaaggatgcaagggaagacagttttatccaaaacttattttttccgagttaaataaaagttaccggccaggcgcagcgactctcacatgtgtaatcccagcactttgggaggctgaggcaggcgagagatgaggtcacgctatgttgcccaggctggtctcaaactcctggactcaagcaatcctcccacctcagcctcccaacatttgacattgaactcctgacctcctcatctcaggtcaggagtttgagaccagcctggcgaacctggcgaaaccctgtctctactaaagaaaaaaaaaagaaaaaaaaattagccaggtgtggcggcaggcccctgtagtcccagcactcgggaggctgaggcaggagaatcacttgaacccaggaggcagatgttgtggtgaaccaagatcataccactgcactccagcctgggcaacaagagtgagactctgtctcaaaataaataaatagataaaaataaataaataaatgtcatccatttcatagactatttgggtaggattcagctggagaaaacaaacaccataatcccgctctacagagatgatcagtctgccatttttccttctttttttctcctctgcgccagacgatctgcaggaagtcttttccatcaatgaattaagatgctgaatcagaaatttttatttttgtttttcatatgacaaatagtaaatccaccactgcttggccagagtatgcgatttcttttcctgccatgttatgatattaagaacagttttttaaaaaatgttttttaaatgaagctatcaagatggggctgccagagctgcctttcctaggtgcctctgaaagctggcctggtgtagctgtaccactcaccaggagtacagcagtctccctaaaaagtggagcaaatacatgtaggaaccatggagaaggaggtacctgccagccagagagaacacgggacagaggccgaagtggcccggaggccgctgggcgcagcctgcccctctgccgctccgctgcgggagcccccgggccacgctggcagcagtcagacagggccgagagctgagagaagtcagttcttccaaaattaagatttctaaatgaaatatctgtttcatttttacgtttttaaaaaccattttgaaatatgtacagaaaggttgcagaattaacactcctcacccagcttcccaagtgcaggcgtcttcccacgctgctttctctggctgtgtaaggggctcaggggtccctgtgtccttgttgtgtcctgtgttctgcggtggcccctcgttctctgctcttattgaccttgaccattgcgacaacacagttcagtcactttgcagctgtgcctcagtctggctcatgggccctggggaccagatatggagcatgtcctcaggcctcagcaggaagacccatggcatgcagagcctcctagatccttaatctgtgccagatgggcatcaggtgaggggcacaagatttttggatgggcccctttcccaggttcccatttattaccagggctggaggatgagctgttagtgcatgaaaatcactacagaagcttgcccaggagctgcatggggtgccggctctccggacttgttttcctttgccctgttgaaagttggggtcccaacgctgggcgcagtggctcacgcccgtaatcccaacactttgaaaggccgaggcgggtggatcatgaggtaaggagttcgagaccagcctggccaatatggtgaaaccccgtctctactaaaaatacaaaaattagctgggcatggtgatgcacacctgtactcccagctacttggaaggctgaagcaggagaatcgcttgaacacaggaggtagagcttgcagtgagccgagattgcaacgctactgcactccagcctgggcaattgagggagactccgtctcaaaaaaaaaaaaaaagaaaaaaaaagaaaactgaggtcccgagctccccttgtcaccccaagtatctagccgccactaggtcctggtgttcttttggcctcaggagttctttttttttttttttttttttcttttttgagatggagtctcgctctgtcacccatgctggagtacagtggcgcaatctcggctcactgcaagctccacctcccaggtttatgccattcttctgcctcagcctcccgagtagctgagactacaggtgcccgccaacacgcccggctaattttttgtatttttagtagagatggggtttcaccgtgttagccaggatggtctcgatctgctgacctcgtgatccacccatctcggcctcccaaagtgctgggattacaggcatgagccatcgcgcccggccagcctcaggagttctttaatgtccccacttttcatctcctttgctgccttctgcttccagtcaccaccatcccagggtctcccggccactcccaccgccgccactttgccagcccagagaaccctcacaaagcatatctggtctctgagtgctagggtgaattccaggcagggggattagctgattgctctcctggggcagactggacatctcaggtggtgataacatgaggggatctgagtgacaaggtgggccaggacactgggtggacagagtgaggctgtcttccccaggtggccccccactgggcccacctctcaccagcctcatctgcctctggtcttctggctgccccccattctgcagacctgcagttcctgcctcctagaccacctgcccccacccctccctcggggtttatctggctagttcccgtctctgccggattcgctggtgtctgcctccgcagtgcacctgcagagaagcccccatcacccactctgccgcccctgcctggggagctgggcccccaccaggcctctctcccggcttccgcaagttaagctgctccctgccaacaaggggccggcaccctttggttcattcagcctgagcctgttgtttccttttctcggcacacccggagatgctggccatctgtgtgtgtggataaagggaagccggctttcctctgtctctgcacacatctcaccaaactgtgcagttccggaaggtcaaggactgtctctttggagcagcctttctgacagaacgttctgggatgatggaaatgttgtatttggtgctgtccacttcagtagctgctggccacatagggccgttgagcattttaggcatgactcatggaactgaggaactggatttttagttgtatttacttgtttcggagatgaggtctcgccacgttgcccaggctggtctcaaacttctggaccgaagcaatcctcccatctcagcctcccgaatagctgggactacaggctcgtgccaccatgcccggctgtgttttattttaattaatgtaaacatgtggccagggcttccatactggacagtgtggctgtgggcagtctagctgagctgcctggaagcaagggcagatggtgagttactcagcttcatgcaagaaaggaagatgcttaaagggtgggtttgtttcctgtttaatgaacattttccagaaagaggggagatcccgtagcagtgggtttcagatacaggagaccagacaggagaaaatattgtgagatgggaaagtggatgccagcaacaggaaacagcagagaggggctgaagttctcgaaaggccaagaagagcctggtgggaaaccgctcgcacctcaggactgcctgtgctcagggcacaggatcgactttttcgccttgggctgctttttgttttctttctgtgggtaacaattttattgcagtatcattgacatacactgaactgtacatacttaaagagtacaatttgatgagttttgaaatacgtataaacaccagaagccatccctgcagtccaagcagcgtagacgcccggaccccagagttccctgtgtcctatgtaatccccctccgacccctccttgccccacctgtccccaggtaaccactgacctgccttcagtcactgtaggttaatttgcatcttctagagctttgcataatggcctcctgcagtgcgtacgtggtttcctctgacatcttccactcggtacagtgattcggggactcacccaggctgtgtgtgtccttcccccatggccaagcagggtcccagcagtgccgtttgtccatccgcctgcctgcaggggagctgggcggcttgtttttacgtaaccttcacgcatgagcggtttgtaagcccgctcaccccgttggcagggtgttgggccaagcactgctctggggcaggctggcagtgaaacccagagactagaatccgcttatgaggggggtgcgtctttgcggagacccttagagcccacagcatcattactctggtgcattttcttttgagccactgttacggcaagagatccagggcgtgccacgtgaaacgcgacagggcctttcctcaagacctctcctccgtgtggtgcgtttctcacacagggtctaggacatttcaattcttgttatcaacaaccagattcaaaacttgccttttgttaaagtttcggggggccccttcctccccaggcctctggggagtttggggctcctgttccctaacctttcctcagccagcctgcccatcacctttccttctccccaggaaatgaattcccagatatacgcacagtcccagtgggcccttgcacacgtgtgtctctatgtccctgcctcgggttagagcattcatgttttgagagcagggaccctttggctactgagaagagtgaactgaggcacggttagcaggcctctcgttcagtggaaccagagggagtcggaggttggggctgattaggaagtttcagaagccaatgtaaactcctaagaatgcaccagagaataaaagtttacttgagaataatttttcccagggagatgtttcataggatgggacacttaacttgaggttttggttttatcttcatttttcttccgctggtaccaaccatataaatttatatatatatttcccaatacaaatgtatatgtactagtaagacagatgggaaatatatatatatctatttcccatctgtcttacccattcttgaaatcagttcgtattcaaccagttgggatttgttttacgtggacactgaacccagccatccctttcacagaacgtgaggaagccttgcttttcaacctggtttttggagtcccgagctagtggccagctctctcagccccacacgtaatacctgaatggagaaatgtccttccctcgacccgtgtcccgtccagcaggcttcaggggcagctttgtaactccagagccaccccctgcacgtcctctctctgcattttagacctaggtggccaggcaattgtgggaaatggaaagagctctgactgccccctgccagcccagggtaaccacagccatgcgaggtccctgcccgtacctgggaactagccatgaagggcatctgccaggcacgtgcccggcacctgtctgcctgcttaagataaaagaccaaaaatgagcgtttttcctttggaaattcatactacaccctcattcccagggaaggaaataaattgatcggtattgcacaagaacgagatctttgattcgtgtcaagattcgtttctaaccaaccagccagagctgaattgtttctcgctggtgagcctggcctaacaaacgtatgagaggagaggtttggattttttttttttttgagatggagtctcactctgtcgcctaggctggagtgcaatggcgtgatctctactcactgcaagctctgcctcccgggttcaagcgattctgcctcagcctcctgagtacctgggatcacaggcgcccaccaccacacccagctgattttttgtatttttagtagagatggggtttcaccatgttcgctaggctggtcttgaactcctgacctcacgtgatctgcccacctcagcctcccaaagtgctgggatttcaggcgggagccactgcaccggccgaggtttggatttaatgtattactttactcagcaggaaagtgtccatgggttgtgaaagttaccaaaagcctgttgatcgccctgtgaaagaactttcctggccattgctctgacattctgagtccagaatactgtcatcttgattttatattggacattaaaagtcagtcactgcgttaactttgtttacatataaaaggaaggatgatatcattctatggaatactgaaaaaactggcttggattactagattttcgaagaccctatgctctcaggtcatttctttttttttttttttttgagacagagtctccctctgtcatgcagtggcgcgatctcggctcactgcaacctctgcctcctgagttcaagagattctcctgcctcagcctcctgagtagctgggattacaggtacgcaccaccacgcctggctaattttggtatttttagtagagatggggtttcacacgttggtcaggctggtctcaaactcctgacctcgtgatcctcccacctcggcctcccaaaatgctgggattacaggagtaagccactgtgcccagccaggttatttcaatatgtatcttgaaattcaccgaaaatgctgggcatggtggctcacggctctaatcccagcactttgggaggctgaggtgggtggatgacctgaggttaggagtttgagaccagcctggccaacatggcgaaaccccgtatctaccaaaaatacaaaaattagccaggtatgaccaggcgcagtggttcacgcctgtaatcccaacactttgggaggctgaggcaggcggatcacgaggtcaaggagatcgagaccatcctggctaacacagtgaagtcccatctttactaaaaataaaaaaaattagccgcgtgtggtggtgggcgcctgtgatcccatctactcaggatgctgaggcaggagaaacagttgaacctgggaggcagaggttgcagtaagctgagattgtgctactgcactccagcctgggcaacagagcgagatgccgtctcaaaaaaaaataaaataaaaattagccaggtgtggtggtgggtgcctataatcctagctactcaggagactgggaggctgaggcaagagaatcacttgaacccaggaggcggaggttgcagtgagccaagatcgtgccactgcattccagcctgggtgacggagtaaaactccatctcaaaaaaaaaaaaaaaaaaagaaagaaagaaattcaccaaaaagcaaattctgaaaacataagttgaatttaattttcaagcagagccctttggtcgtgggagggatggggaagtacatcttaaaaacatgtctaaaaagggaatcctgtggcatattggtacctagatgtgagagttgtttcgtgtctcgactgaggaacgacacccatgttttccttcattttgtaatctcaagtcattgctccttgggatgctcaaaggtgacccataggtggcctctcatgtccagatgccacacagcatttcactagactcggttagataggtggtcgtgtcaaatacacgctgccctgcagcatggatcacgagcacgtgtacagaaacctttcactttgctattgtcacaccttcagtaggtctctgggaccaagatactaccgtgctgtattctgggtagttcttttatttttttataatctagtactatgcaggcccattcaaaaaaaatgctgatagttaaaactttatttttctcagctccgtttatattttgtaatcgtgctttatagacttaaattcatctctattccccaagtccccaccactgaaaattcttggttctctttttttttttgagatggagtctcgctctatcgcccaggctggagtgcagtggcacgatctcagctcactgcaagctccgcctcccaggttcctgccattctcctgcctcagcctcctgagtagctgggactacaggcgcccgccaccacacccggctaatcttttttgtatttttagtagagatggggtttcaccttgttagccaggatggtctcgatctcctgacctcaaggttcgcccgcctcggactcccaaagtgctgggattacaggtgtgagccaccaagcccggctgaaaattcttggttctcttaaatcagaagtaaatgatttttttttttttgaagcagagtttcactcttgtcactcgggctggagtgcaatgtcatggcctcggctcactgcaacctctgcctcccgtgttcaagagattctcctgcctcagcctcctgagtagctgggattacaggcatgcatcaccatgcctggctaattttgtatttttagtagagacggggtttcaccaagttggccaggctgctctggaactcctgacctcaggtgatccccccacctcggcctcctaaagtgctgggattacaggcatgagtcaccgcgcccggctaatgatctttaaataaaaatattttctaggccgggtacggtggctctcgcctgtaataccagcactttgggaacccaaggcaggcagattccttgaggtcaggagttcaagagcagcctggccaacatggtgaaaccctgtctctactaagaatacaaaaattagccgggcatggtggtgggcacctgtaatcccagctagtcagaggccgaggcaggagaatcgcttgaacctgggagatggaggttgcagtgagccaagatcgcaccactgcacaccagcctgggcaacagaaccatctcaaaaaaaaaaaaaagaatgttccagcatccacccccagaagccccatcagaggactcttcacttcctcaagatgagttttctctcaccccaagtctagccctagcatcttctcactgaaaacgactcaacattaggggctgggcgaggtggctcacgcctgtagtgcctgtggttcaggaggctgtggcaggaggattgcttgagcccagtaggtaggtcaaggctgtagtgagccttggtcatgctgctgtactccagtctggataacagagcaagaccccgtctcaagcaatcttcctgcctcagcctcccaagtagctgggactatgggcatgcaacactgtgcccagctaattattttttgtagaggtaaggtcttgttatattgcccaggctgggctcgaactcttggcctcaagtgacactcctgcctcagcaacccaaagtgctgggattacagctgtgagccactgtgcccagcctgagacccaatctttaaaaagaaaaaaaaaaaatggccccttcctaagggacagagacctggtgctttcagacaggtgaaatgcataaccaaaaaataaatatgtatgtcggtgattcaaaatgattctcaaatcaatctagaaggagaaattaggaataaccaggaaaatgttgaaaaggaagatgtaagagggagagcagatattagatactagaaagtaccataacaccacaacaccagtttaaaaacctgtggtgctggctcagaaacagactaaaatgtagccaggcacagtggctcatgcctgtaatcccaatactctgggaggctgaggggggatcgcttgagcccaggagtttgagatcagcctgggtaacatagggagaccccatctctacaaaaaaaaaaaaaaaaaaaccacaaaaattagcccaatgtggtggcacgtgcctgtgggcccagctactcaggagactgagatgggaggatcgcttgagcccgcgaggtcaaggctgcagtgggtgacagagggagaccctgtccccaaaaaattgaaaaataaaagtaaaagaaaaaaagcctcaaaaacaaaccaaaaagtataaaagaaagaaatgttgagagttctacaaaagggcactgtcccactttttagggggaagtgtaagttgggacaccctctgaagagtcacttagcagtgcatgaccgcagcctcagagagcaggaagccagcaggtgaatatacaaagacgtgtgtgcacacagcttttgtttgtttgtttttcttttgagatggaatctcgctcttgttgcccaggctggagtgcaatggcgcaatcttggctcactgcaacctgggttcaagcaattctcctgcctcagcctcctgagtagctgggattacaggcgcacgccaccacgcccagctgattttttgtgtttttagtagagatggggtttcaccgtgttggccaggctggtcttgaactcctgacctcaggtgatccacccgccttggcctcccaaagtgctgggattacaggcatgagccaccgtgcccggccagctttttatagtagcaaacattttaaagcaacctgaaagtccataaagagataatggattgagcaaactgtgctctacacacacactcccagcagaacacacacctgccaaaaatggaagtggtcgagtacgcctgttggtgttgaaaggcatttcagtataaatcagtgaataaatcaggttacaaaacactgtgtacaagatgatcgtacatctgctctacacacacacatacaaatccagaagcacgtcacacaattttaaccgaccctatagaccgagactcataatttaaaattttttctgtttttacctaacactgattttcctgcagaaacatacattgtttatataattattttcattttttatataacaggaaataaacttacctactttaaaaaatatccaggccaggccgggtgcagcggctcacgcctgtaatcccagcactttgggaggcagaagcaggcggatcacgaggtcaggggatcaagaccatcctggctaacacggtgaaaccccgtttctactaaaaatacaaagaattagctgggcgtggtggtgggtgcctgtaatcccagctacttgggaggctgaggcaggagaattgcttgcacccagggggcggaggttgcagtgagctgagtcatgtcattgcactccaacctaggcaacaagagcaaaactttgtctcaaaaaaaaaaaaaacaaaacaaggctgggcatgggggctcatgcctgtaatcccagcacttgggaaggccgaggcgggtggatcacctaaggtcaagagtttgagaccagcgtgaccaacatggaaaacaccatctctactaaaaatacattagctggatgtggtggcgcatgcctgtaatcccaactactcgggaggctgaggcaggagaatcacttgaacccgggaggcggaggttgcggtgagctgagatcgtgccattgcactctatctcaaaaaaaaaaaaaaaaaaatcctttgctcatgcctgtaatcccagcactttggaaggccaaggcaggaggattgcttgagcccaggagtttgagaccagcctgggcaatatagtgagatcctatctctacaaaacctttttttttagagagaggatctcactgtcatctgggagtgcagtggtgccagcctcagggctcactgcagccccgacctcctggggtcactgcagcaccgacctcctgggctcaggtgatcctcccaccacagcctcccagctcactggaactacaggcacatgccatcgtgtccagctaatttttttgtagagacggaatttcaccatgttgcatctaactcctggagtcaatcaatccactcgcctcggcctcccaaagtactgggattacaggcatgagccaccgctccgggcctataaaaactttgttttttcgttttgttttgttttgttttgtttttggagactgagtcttgctctgtcgcccaggctggagtgcagtggcgtgatctcagctccctgcaacctccgcctcccgggttcaagtgattctcctgcctcgccctcccgagtagctgggactacaggcgcccgccaccacgcccagctaattttttttatttttagtagaaacggggtttcaccatgttagccaggaaggtctccatctcctgacctcgtcatcccccccgcctcggcctcccagagtgctgggattacaggcgtgagccaccgcacccagacaactttttgttaaaaattcttatcagtcgattaatagcatgtgtgtgttcttcatatgctagttagccacagttaattcaaaatcacttatttttattttttgtaccgccgcacaaaaaagtcatgcattttctcagctgtggagtgtttgtttttcttccttttccttaagttgcatgtgatgcccataacacagactcttcctgctgcctcctgctccctgcctgcccctcccgcctctgtggttttctgccctctcagtaactgcacagaatgagtcacctcttgggcagagccccagtggtttcaacacaaagacctttttagaagctgctgctataggaagaagcgtcgaggagcctagtatccgggtgggagagtgggtagagttattatagggaacacagctgtggccactacccatggatcttccagatcccaaaagatgaaatccaccacc[450 bp omitted]cgtgagccaccgtgcctggccaattttttttgtttgtttgtttttgtttttgtttttgtttttgttttttgagatggagtcttgctctgtctcccaggctggagtacagtggtggggtgatctgggctcactgcaatctccacctcccaggttcaagcgattctccgcctcagcctcccaagtagctgagattataggtgtgtgccaccacacccggctaatttttgtattttttagtagaaacagagtttcaccatgttggtcaggctggtctcgaactcctgagctcacatgatccatctgcctcagcctcccaaagttctgggatgaggcaggagaatcgcttgaacccgggaggcagaggttgcagtgtattttttagtagaaacagggttttaccatgttggtcaggctggtctcaaacactcactcaggctggtggctcacagcgtgagccactgtgcccggcctctacaaaaacttctttaaaattagccaggcatggtgacacatgcctgtagtcccagctgctcaggaggtggaggcaggaggatcatttgagcccaggtgctcaaggctgcagtgagttgtgatcgcaccactgcagtccagcctcagagacagagcgagactctctcttaaaacaaaacaaaacaaaacaaaacaaaaggccagttgatatttatacttcttccagtgaaatttcttgataatattccccagttttctactctgtaaaaatgaggtgttaacagctccctctctgggctgctgtaggaactacacttatggcatcgatgcccggccacacctggggcctcactggcccccaggctcctcagaccttttatgagctgcttttattttgcaaaatgttttcttttcacttggtttgataataattttgtcctgaaacttaccacataaggttaagattccaaacctagaccaatccccctgcctttttatttaatgactaggagcaagactgtgttgctggttatcccagtaacgatggtgtcctgagctgagctgcaactgacatgcagaaaagtaggctcaaccttgttcttaggcgtggagttgaggggagtcagatgactccattgcaaacaggactggctgtgtgctcatggatcccagtgtaaaaatggaaacacagggctctatgttcaaaaattagcaacatttcaagatggcagcagccaagccaagcattgggccttctgagtgcagggccccgcattgctgcccgggtctcatgcagccacgaaggcagccgtaattggaaacaacaggctcccttcacagcaaatcctcccgggagaggagggtgcaatcatgcagtcctggagggctctcccgccctgccctcatggctcctcactgtgcctgaggagggtggtggccacagccacgtggcgggaagcccccattccggcctggccatgggccagcttgtggccctggggacatctttggcccctgggccctcaaagcctgcggcccttcaagtgaaaggcggctgctccacactcactcctgatgactgctctttccctcccttccatgcacagaaattcattgagtttgaagatgctctggaacaagagaagaaagagctgcaaatccaggtggagcactacgagttccagacgcgccagctggagctgaaggccaagaactatgccgatcagagtaagtggctggcgggagcctggaggcgcgcttgatgggcgctgctctgggacggctctggttggggtgggcatggagcgccttccacacaaggggacgagaggaagcccagtgggagcctcagccatgtattccagctctttgtactgctgcctgtttctgtaatgggccccagattgtgtgtggaaataagtaaatcaggccactgtggccccatagcacttttgcttcagagtgaattctgacccccagatcacaagtctgtggtcctgaaggtccttcctgaatcttttgaacagagctcctgcagcccctggggtccccacctcttcacactgctgaggagtgatggctccttctcaggcaggagggtgggcccgctggtgtagccccattgaagtgacagcgcctaggtggggggcacagctgatcagggtgtctgtcccctgcaaggcgaagtagcagaaagggtttattattattattattattattattattattattataagaacagttggtttacttacctttaaaagtctttgcttaaactctactgtcaatgttttaggccaggcgtgatggcatgcgcctgtggtctcagctgggctgaggttgatactgccgtgtgggcacacagagacctcatctcttaaaaaaaaaaaaaaggccgggcatggtggctcacacctgtaatcccagcactttgggaggccaaggcgggtggatcacctgagcttaggagtttaaaaccagcctggccaacatggcgaaaccccgtctctataaaaatataaaaattacccgggcatggtggcgggcgcctgtagtcccagctactcgggcaactgaggcaggaagatcgcttgaacccaagaggcggaggttgcagtgagccaagatcgtgccactgcactctagcctgggcgacagagtgagactccatctcaaaaaaaaaagaaaaaatttaaaaaagaagaagtgatgatttcctgtgtaattttccttttctgtaattagatgttttgttttgtttggagacagagtttcgctgtttttgcccaggctggagtgcaatggtgcgatctcagctcactgcaacctctgcctcccgggttcaagtgattctcctgcctcagcttcccaagtagctgggactacaggtgcccgccaccacacccagctaattttttgtatttttagtagagatggggtttcactgtgttagccaggatggtctcgatcttctgacctcgtgatcctcccaaagtgctgggattacaggcgcgagccaccgcgcctggccccagatgttttaatgattgaaaccaatcggctgcggtttccctagctacctcaacagcaggttcctttatctctaaaaagttaagatcaaatttgggaaagaaactgttttgatatgttagacttactcctatccccagccaaggcctaaaggctgctgtgctgacaatgacctgctgacgagtctgggggccagagggtgaccacggtggcagcttccacacacatggaaacacactggcattcacaatgcaaagcaaacctaagacccgtgctgagcatacctaggtaatgcctttccataattacagagtctctcctggtccctcggctttcagtacatttcatgtgtgaaacattctcagctctcttcttagaaggagaaaaacataagctcaaattacaggcaaggctgggaacagtggctcacacccataacttccacactttgggaggctgagggggaaggatcccttgagctcaagagttcaagaccagcctgggcaacctggtgaaaccccatctctacaaaaaatacaaaaattagccaggcacggtggctcacagacttgtgggcccagctactcgggaggctgaggtagaggattgctcaaacccaggagggagaggctgcagtaagccttgatcacgccactgcaccccagcctgggtgacagagtgagaccctgtctcaaaaaaaatcaaattacaggctgaggctgttcactgggccagcaccaggagttggggccagatgagtgcagagagcaggccccgggctccctccaggtggtggctatactctgccccagcgggagctcacagagaggctgtggggctctgacctcacacagacaggtagcctctcccggggccacagccgttgccggggtcagcacaagcctgggatggctggttggctccctcctgcagcagccagttacatgtgtgcagcgtgcagtgtctataactcgtgtgctgtgtgcagtgtctgtgtgttgtgtgctgtgtgcagcgtctgtgtgtcatgtgctgtgtgcggcatctgtgtgagtcatgtgctgtgtgctgtgtatgagtgttgtgtgctgtgtgtggcgtctgagttgtgtgccgtgtggagcgtctgtgtgagtgtcatgtgctgtgtgcggcacctgagttgtgtgctgtgtggagggtctgtgagtgtcgtgtgctgtgtgcggcatctgagttgtgtgctgtgtgcggcgtctgagtgacgtgtgctatgtgcgggtctgtgtgactctgctgtgtgtagcgtctgtgagttgtgtgctgtgtgcagcgtctgtgtgagtgtcgtgtgctgtgtgcggcgtctgtgtgagtcgtgtgctgtgtgcagcgtctgtgagccgtgtgttatttaccatgtgtgttagtcacatttgctgcatgcagcgtctgtgagtcacatgtgtcacgtgtcatgtctgtaagtcttgtgttgtgtgcggtgtctgtacatcgtgtgtcaggtgcagcgtctgtaagttatgcatgtttggtgctgtgtctaagtcgtgcgtgtgaggtgctgtgtctaagtcgtgtgtgtgaggtgctgtgtctaagtcgtgcgtgtgaggtgctgtgtctaagtcgtgcatgtgaggtgctgtatctgagtcacgcgtgtcaggtgtgatgtctgtaagcacctcaggctccttagggaagaccagactgactgctggcgctgacgcctatgctgctcctcggggtgagatccccgcgccagcagtgcagcttccctgggtgcctggtagagatgcgagagcccagcgtaggccgccgcggcctccaaggatgtgccaggccagttaccccccagatcacagagcaggatggccaaagtgagatgttgagccacataatctgtggagtcatttctaaacagacaccagaaagctggggaggatgggagggcaccacgccgaggacagggcacaagctggtggagcaccttaccagctgagtcccggccacgcactccctggggctgtctctcacctcgtggcgtcagccctccccattggtgggctgcaggacagagctgaggtttgaacacagctgtggaggcggccatcaggccgggggcacgcatgcaccattggcgggacatagagtggggtcccctggctgcggctgcccgtcggcctgtcatgctgcttctgtgtctcttgggcagatcacgtctggggccagagaggcccgtgttggtgtcacggggggcctcccgtttaagggagacatgactgtcagcccagaaggcacatagtcatgattggcctccccagccctcggcgtgtgtgagggacctcgctgcttgttctgccagacacgaccctttgacgtgtccaggaggttactcactttgaatcccgcctcctcccgcaagcttcttgtgcacctgttgcctgtgcctggcgtgcctgggttttgcctgcatctcagaagcttgtggctgactttagcacagagagcgcctgtgggtttccccacccccatatttaactcccaacagagctgagtgttttcccatggcacagggcacacacagcagccccccagacggccttcacagagctgagtgttctcccatggcacagcacacacagcagccccccagacggccttcacagagctgagtgttctcccatggtacagggcacagcagccccccagacggccttcacagagctgagtgttctcccctcgcacaacgcacgcagcagccccccagacggccttcacagagctgagtgttctcccatggcacagcgcacacagcagccccccagacggctttaacagagctgagtgttctcccatggcacagcacacacagcagccccccagacggccttcacagagctgagtgttctcccatggtacagggcacagcagcccccaagacggccttcacagagctgagtgttctcccatcgcacaacgcacacagcagtctcccagacggccttgcacttgccgggctgctgctggttgcctcaggacccagagtcccagccttgtcctggaaccccctccctctgtggttacaacccaagagttcagggccatggagaagcgtcttgtgcggctcagacagtgattgtgttttccagtttcccggttggaggagcgggagtcggagatgaagaaggagtacaatgccctgcaccagcggcacacagaggtgggcgcccagaggcaagcgcggagacgagggttggagacagggccgcggcctgacgcctgcgactcttgcggaccgtggttttcttccctggcatgtcccttttctagcatttgctgccaggcttgaaggctgtcagccccaggctggttagattcccctccaggacgctgtcttgatttctgcctgcacagggcagccggaaaagcctcacaggttagaggggacggagacagccccccacggcagcgctaatgcaggcgtttccctcctcgcagatgatacagacctacgtggagcacattgagaggtccaagatgcagcaggtcggaggaaacagccagaccgagagcagcctgccggggcggaggtacgcggggcgcggcggggtggaggtacgcggggcgcggcggggcggaggtacgcaggacgcggcacatgccagggtcgtagtgcttgttatggcccgcgctctgggctcaggacgacagggaacactctggagacccaggaggagggagctggttggagcgtggctgagcagggatgtgggggggcggccctgggcgacggacatgtgtcgagcccgtgtgtcccttctgctcggtccacaattcagtcagggaggccccgggcagcttgcgcatatttaacccttactatccacagattctgtgtttgcaaatgtatctactcgctaaaatatatctgtgacctcagccgggcacagtgacttatgcctgtaatcctagaactttgggaggccaaggcaggaggattacttgagcccaggagttcgagctcagcttgggcaaccagcaagatcttgtctctacaaaaaaaaaaaaaaaaaaaaaaaaaaaaattgtttaaaaattagctaagcatgaggtggcacttctaggacatactgcctcaaataactacctgtagtcccagctactcaggaggctgagagaggaggatagcttgagcccaggggctggaggctgcagtgatctacagtcgcgcccctgcactcccacctgggcagcagagtgagccccgtctctaaaaaaataaaaaaagaaaatcatctgctcatgtgaggtcaaagaataaacaacaaaaaagaggctggtatggtggctcacgcctgtaatcccagcactttgggaggccgaggtgggtggatcacttgaggtcaggagctcgagactagcttggccaatgtggtgaaaccccatctctattaaaaatacaaaaattaagccgggctcagtggctcacgcctgtcattccagcactttgggaggccgaggtgggcagatcacgagatcaggagatcaagaccatcctggctaacatggtgaaaccccatctctacgaaacactcctgtaatcccagcactttgggagggcaaggagggcggatcatgaggtcaggagatcgagaccatcctggctaacatgttgaaaccccatctctactaaaaatataaaaaattagccgggtgtggtggcgggcgcctgtagttccagctattctggaggctgaggcaggagaatcacttgaacccgggaggcagaggttgcagtgagccaagatcgcaccactgcactccagcctgggcgacagagtgagactctgtcaaaaaaaaaaaaaaaaagggtaggcacagtggctcacacctgtaatcccggcactttggaaggctgaggccggcagatcacttgaggtcaggagtttgagaccagcctggccaacacggtgaaaccccgtctctactaaaaatacaaaaattagctgggtgtggtggcacatgcctgtagtcccagctactagagaggctgaggcaggagaattgcttgagcttgggaggcggagactgcagtgagctgagatcacgccacagcactccagcctgggcgacagagagtccatctcaaaaataaatacataaataaataataaatcataaaaataacaaaattagccagtgtgatggtgcatgcctgtggtcccagctactctggaggctgaggcaggagaatcacctgaaccccaggggcggaggtggcagcgagccaagattgcgcactgcactccagcctgggtggtagagtgagagcctgtctcaaaaaagaaagaaagggaatcagtactcagagcacttaacagtcctttgcagacaggcacacattagggagaaacgggagtccctgtgctggctccccacagaggtgggacaaggcgatgctctgccctcctcttcacctcctacccagatgcccggagaggagacaggagggccaggcagtgtcacgtgtcacgcatgaggccagttctagggttagttccaggggctccaagcccagctgtggcacctgttagtggggtggctagtcaccctatatttccaacttcctttaaaataaaggaaatagaactgaccaggatgcattgctttgaggatttcctgttagtagggtggccagccaccctatatttccaacctccttttcgtttttgtaaaataaaggaagtagaactgaccggaatgcatggctttgaggatttgagatcacaatcttatacgcgtacctgcatgtgtacatatttttcccctaggggcaatggtttagtgtttgagggactttctagaacatactgcctcaaatactgtgtggatgagcccaggagccttggccagccctgcactgagtcttattccttccacagggtgggggtaccggtgggtttccagggctcggtgctggttttcctcagagagtcgggggagcctgcctagaatgggttcctctccgttttctgtgccctttgaatcaggagaaagccgggctgcaggccccagggagcagagcatcagagatcttgccagggtattgcagctccaggggaccggccatgggagaccagagacgcgacctgggctggggaggttggcgctctcgttctgagtctccagcagcggggaggaagggcctgaagtcagaagctgccgtcctacagagctggggcagctggaaggggggaagcctgtttctgcccccaagcctcccacagccagggctgcgatggcaaaagcctccctcacaccccatcaaggcctggccagctgcgaaagctgcatcgtgcctgcctgttctgggggttacacctgcaaacgagaagggtcagaacgtccagctctgggcttcatgggtcacgttctggatgatacagaagaagctgtcagactctgcttccgagtctctggacgtgagagcaaatgcacggtgtgcgcaaaggcccagctggccaggggcgtgccgtggagcctgcagcagcaggtcctcaggcagtctcgctgctctcagctggagcagggacctgcagttctcagggacttgccctgagaacgggcggcgccggccatctgcccacccagagcaccatgagaactacgccagggcgtgtggatgccagcttgccccgagaacaggtggtgccagccatccgcccacctggagcaccatgagaactacgccagggcgtgtggatgccagcttgccccgagaacgggtggtgccagccatccgcccacctggagcaccatgagaactacgccagggcgtgtggatgccagcttgccccaagaatgggcagcgccagccatccgcccacctggagcaccatgagaactacaccggggcgtgtggatgccagcttggcaagctgtgaaagccttgcaggtgtttccatcagatcccacagtgggagattctcattcgcagctcccgtctcgtggcatgcacgctgggacatcctcacctctggctctcggcagttggaagaggattccaagctaactggaattaaaatcgaacctggacccgggatctttgtgttgtttttcaggggagctgggggcagaggcaggcagtttggccatcccctgggagctgcagcattccagaaccttcagctgcctccttgccagcgcagcctcagacaggagtgcctctgaggctgtgtcggagggcgcctgggcaggaggagcccagcaacagtgtgcccagctcatcccagatcccagaggtgtgacgtgtgaactcaggacgccggccgagagcccaggttccgagttgcagtgatccccaccccaggcccacagacaacacccgagaggtcctgagagccccagggccatgtgagctcagccaagagcagaggctgccccagctccagagccgcctgatgctgccgtcgtcatgggccaggccaggcctacctggaagaggcgcgtggctgcggggcaaggagtacttcgtcctgcatgtttctctcatggtgtggggcagaaggtggcccaggaacctgctgtcgaggtgtccccgcgggacccagggacctgagctgagtctgggctgggcgccgcccccgtcccttggctcgtcctggcgccgagagttcagtgggaagccccatggtggtgcacctcgtccttgtcagggccccactgctggggtcccctctgcagctctgccacggctcctgaaggctatgtcagggctgctgcactcccctcagggaaccagacggtgccctctggaagaagcccctcgatcattttgtaagggatggatctggggtgctctcttgtcagcgctgccacaaccaggtccttctgcctgacctggccccagccattcacttcttctgggcacacaggacctttggcaccggccgtgggagcaacgccagcagcagtggctgtgtggtaggggccttccccagccacggaccccaggaagcctccatttgtgaaacaggacccctgcacctctgtgggagagggaggggtctcatccaggtttacaccaaagccttggttgccatgactggatccagccagaaggcaccctgcagtggggtctgcgcagctacattactctggcccctgggcctccttgccagatctccacagcacgtgagaagacgttggccctgcgggaagaaggcgctggggctggcggccctgtctccctgagcatgccgaggccctgacgggagcatgctccatgggggcgacagaggggcagggctatggctgggctacccctgcctccctccctggccggcggtggtactgagccgcatcaccagcgcacggaatcggtcacgcctgctgttgcggtggtggcattaagagccacctccgggctcgtgtgtcccctgcctccccaggccgagaccctggccaggaaggagagggtggggctcacgtgctgtctgccacctgcctgcaggcgtggatggcagccacagccttgtgcctctgaaggcatgagccagctaaaggaggaaggcacggcccccctcccctgtcccgagtgcttgcctttgtggggtcaggggtgctgggacaggccttggtgatgtatgctgttgctgggcagttgagctggaaggagcccgtccctgctggacacctgctctctcttctctggtgtggattctgtcctgccacaacctttggtcccttgggggacacatatttgagtcagtcccatctgctcagccaaaaccccttgattcaccatgagggcgccgtccatcctcagcgctgggcgccctccttcctgacccagatggacattttccttcacgcctggcgtggcttagtgagtgtgtgtctggaatgcagtcggtgtgagtgcaaacgccaggcagtgttctcgggccactgctgcagagtgtgtgtgtgtctgtgtggccacatgtgtgccgtcaccacgtgccatgtgtacacacgtgccaggcgctgtcttgagacattcgcgcagtgcacggcactggggacacgtggcactggctgaactgccacacagccccgttccagggcctcttgtcaaagccaagagggctcgtgtgtcgcatgtctgtccctcttgggtgcctgtgtgtggcttctgtctcatcggggtacggccgccctgcgtgtctcacatcaccacatcctggccgtccgtgtgagcgtccatgtgaccatcggtgtgagcatccgtgtgagcatgtgaccgtctgtgagtgtgcgacggtccatgtgactgtccgtgtttccgtgtgtgtccatgtgagtgagcgtccatgtgagcgtgtgagcgtccatgtgagcatccacgtgagcgttcgtgtggaacgtgtgaccgtccatgtgagcgtccgtgtgaccatccgtgtgagcatccgtgtgaccgtccgtgtgagcgtccgtgtgagagtgtgaccgtccatgtgagcgtccgtgtgaccatccgtgtgagcagccgtgtgaccgtccgtgtgagcgtccgtgtgagagtgtgaccgtccatgtgagagtccgtgtgaccatccgtgtgagcatccgtgtgaccatccgtgtgagcatccgtgtgactgtccatgtgagtgtgaccatccatgtgagcatccgtgtgaccgtccgtgtgagcgtctgtgtgcctgtccgtgtgagcatccgtgtgaccgtccatgtgagagtgtgaccgtccatgtgagcatccgtgtgaccgtccatgtgagagtgtgaccgtccatgtgagcatctgtgtgaccatccgtgtgaccgtccgtgtgagagcgtgaccgcccgtgtgagcatccatatgaccgtccatggagcatctgtgtgactgtccatgtgagcatccgtgtgaccatccgtgagcatccgtgtgaccgtctgtgtgagtgtgaccgcccatgtgagcatccgtgtgaccgtccatgtgagcatccgtgtgaccgtccatgtgagagtgtgaccgtccatgtgagcatccgtgtgagcgtgtgaccgtccgtgtgtgtgaccatccgtgtgagagtgtgaccgtccatgtgagcatccgtgtgaccgtccgtgtgtgtgaccatccatgtgagcatctgtgtgaccgtccgtgtgagcgtccgtgtgagcgtgtgaccgtccgtgtgagcatgtgtgaccatccgtgtgagcgtccgtgtaagcatccgtgtgagcgtgtgactgtccgtgtgagcgtgtgaccatccatgtgagcatccgtgtgaccgtgagcgtccgtgtgagcgtgtgaccgtgtgagcatccgtgtgagcgtgtgaccgtccgtgtgtgaccgtccgtgtgagcatccgtgtgagcgtgaccgtccgtgtgtgaccgtccgtgtaagcatccgtgtgagcgtgtgactgtccgtgtgagcgtgtgaccatccatgtgagcatccgtgtgaccgtgagcgtccgtgtgagcgtgtgaccgtccgtgtgtgaccgtccgtgtgagcatccgtgtgagcgtgtgactgtccgtgtgtgaccgtccgtgtgagcgtgtgaccatccatgtgagcatccgtgtgaccgtccgtgtgagcgtccgtgtgagcgtgtgaccgtccgtgtgagcgtgtgaccgtccgtgtgagcatccgtgtgaccgaccgtgtgagcgtccgtgtgagcgtgtgaccgtccgtgtgagcgtgtgaccatccatgtgagcatccgtgtgaccgtctgtgtgaccatccgtgtgtgaccgtccgtgtgagcgtgtgaccgtccgtgtgagcgtccgtgtgagcgtgtgaccgtccgtgtgtgaccgtccatgtgagcatccgtgagcgtgtgaccgtccgtgtgtgaccgtctgtgtgagtgaccatccatgtgagcatccgtgaccgtccatgtgagcgtgtgaccgtccgtgtgaccgtccgtgtgagcatccgtgtgagcgtgtgaccgtccgtgtgagagtgtgaccatccatgtgagcatccgtgtgaccgtccgtgtgagcgtccgtgtgagcgtgtgaccgtccgtgtgagtgtgaccatccatgtgagcatctgtgtgaccgtccgtgtgagcatgtgaccatgtgaccgtccgtgtgagtgtgaccatccgtgtgagcatgtgtgtgaccgtccgtgtgagcatgtgaccatccgtgaccgtccgtgtgagcatccgtgtgagcgtgtgaccgtccgtgtgagcgtgtgaccatccgtgagagtgtgaccatccatgtaagcatccgtgtgaccgtgtgagcgtccgtgtgagcgtgtgagcgtccgtgtgagtgtgaccatccatgtgagcatctgtgtgaccgtccgtgtgagcatccgtgtgagcgtgaccgtccgtgagtgtgtgaccgtccgtgtgagagtgtgaccatccatgtgagcatctgtgtgaccgtccgtgtgagcgtccgtgtgagtgtgtgagcgtccgtgtgagtgtgaccacccatgtgagacgtctgtgtgaccgtccgtgtgagcgtccgtgtgagcgtgtgaccgtccgtgtgagtgtgtgaccatgcctgtgagagtgtgaccatccatgtgagcatctgtgtgaccgtccgtgagcatccgtgtgagcgtgtgaccgtccgtgtgtgtgaccatccatgtgagcatccgtgtgactgtccgtgtgagcgtccgtgtgagcgtgtgaccgtccgtgtgtgaccatccatgtgagcatctgtgtgaccgtccgtgtgagcatccgtgtgagcgtgaccatccgtgtgtgtgaccatccgtgtgagtgaccatccatgtgagcatccatgtgaccgtccgtgtgagcgtccgtgtgagcgtgactgtccgtgtgtgtgaccatccatgtgagcatctgtgtgaccgtccgtgtgagcatccgtgtgagcgtgtgaccgtccgtgtgtgtgaccatccatgtgagcatccgtgtgactgtccgtgtgagcgtccgtgtgagcgtgtgaccgtccgtgtgaccatccatgtgagcatctgtgtgaccgtccgtgtgagcatccgtgtgagcgtgtgaccgtccgtgtgagtgtgtgaccatccgtgtgagagtgtgaccatccatgtgagcatccatgtgaccgtccgtgtgagcgtgactgtccgtgtgtgtgaccatccatgtgagcatctgtgtgaccgtccgtgtgagcgtccgtgagcgtgtgaccgtccgtgtgtgtgaccatccgtgtgagagtgtgaccatccatttgagcatccgtgtgagcgtgtgaccgtccgtgtgagtgtgaccatccatgtgagcatctgtgtgaccgtccgtgtgagcatccgtgagcgtgtgaccgtccgtgtgtgtgaccatccgtgtgagtgtgaccatccatgtgagcatccgtgtgaccgtgtgagcgtccgtgtgagcgtgtgaccgtgtgagagagtgaccatccatgtgagcatgtgtgaccgtccgtgtgagcatccgtgtgagcgtgtgaccgtccgtgtgtgtgaccatccatgtgagcatctgtgtgactgtccgtgtgagcatccgtgtgagcgtgtgagcatccgtgtgagtgtgaccatccatgtgagcatctgtgtgaccgtccgtgtgagcatcggtgtgagcgtgtgagcgtccgtgtgagtgtgaccatccatgtgagcatgtgtgaccgtccgtgtagcatccatgtgagcgtgtgagcatccgtgtgagtgtgaccacccatgtgagcatctgtgaccgtccgtgtgagcgtccgtgtgagcgtgtgagcgtccgtgtgagtgtgaccacccatgtgagcatctgtgtgaccgtccgtgtgagcgtccgtgtgagcgtgtgagcgtccgtgtgagtgtgaccatccatgtgagcatctgtgtgaccatccgtgtagcatccatgtgtgtgagcgtccgtgtgagagtgtgaccacccatgtgagcatctgtgtgaccgtccgtgtgagcatgtgagcatccgtgtgtgtgaccatccatgtgagcatctgtgtgagcgtccgtgtgagcgtccgtgtgagcgtgtgagcgtccgtgtgagtgtgaccatccatgtgagcatctgtgtgaccgtctgtgtgagcatccgtgtgagcgtgtgaccgtccgtgtgtgtgaccatccgtgtgagtgtgaccatccatgtgagcatccgtgtgaccgtccgtgtgagcgtccgtgtgagcgtgtgaccgtccgtgagagtgtgaccatccatgtgagcatctgtgtgaccgtccgtgtgagcatccatgtgagcctgtgaccgtccgtgtgagtgtgtgaccatccgtgtgagagtgtgaccatccatgtgagcatccgtgtgagcatccgtgtgaccgtccgtgtgagcatccgtgtgaccgtccatgtgagcatccctgtgaccgtccgtgtgagcctccgtgtgaccgtccgtgtgagcttccgtgtgaccgtccgtgtgagcatgtgtgaccgttcgtgtgagtgtgtgaccgtccgtgtgagcttccgtgtgaccatccgtgtgagcatctgtgtgaccgttcgtgtgtgtgtgaccgtccgtgtgtgaccgtccgtgtgagcttccgtgtgaccgtccgtgtgagcttccgtgtgaccgtccgtgtgagcatctgtgtgaccgttcgtgtgagtgaccgtccgtgtgagcttccgtgtgaccgtccgtgtgagcatctgtgtgaccgtgtgtgtgtgaccgtccgtgtgtgaccgtccatgtgagcgtgtcaccgtccatgtgagcatccgtgtgaccatccgtgtgagcgtgtgagcatccgtgtgaccgtccgtgtgagcatccgtgtgaccgtgtgagcctgtgagcatccgtgtgaccgtccgtgtgagcatccctgtgaccgtccgtgtgagcttccgtgtgactgtccgtgtgagcatccgtgtgaccgtccgtgtgagcgtgtgaccgtccgtgtgagcatccgtgtgaccatccgtgtgagcgtgtgagcatccgtgtgaccgtccgtgtgagcatccgtgtgactgtccgtgtgagcgtgagcatccgtgtgaccgtccgtgtgagcatccctgtgaccgtccgtgtgagcgtgtgactgtccgtgtgagcttccgtgtgaccgtccgtgtgagcatctgtgtgaccgttcgtgtgagtgtgtgaccgtccgtgtgagcttccgtgtgaccgtccgtgtgagcatctgtgtgaccgttcgtgtgagtgtgtgaccgtccgtgtgagtgtccgcataaccgtgtgagcatccgtgtgatcatccgtaaccgtgtaggcgtccttgtgagcctccgtgtgagcgtgcaaccgtctgtgtgaccgtccgtgtaagcgtgtgaccgtccgtgtgagcgtgtgcacacgctgctgcccacaccctctaacacctgtctccttatcgtcacatgctgaccgtccgtgtgagcatctgtgtgaccgtccatatgagcgtgtgcgcacgctgtggcccacgccctctaacacctgtctccttgtctcgccctctgtgccatcaccacatgctgaccatccatgtggcgtgtgcgcattctgctgcccacgccttctaacgcctgtctccttgtcttgccctctgtgctgtcgctgccgtgtgctgccgtgtctgtcgctgccctgcagtcctcgtcagtcgtggaggaaaaggtaaaacccaagaggtgtgtccactgtggtgctgggggacgaccagcaggcacattagggcatcagttaccagcccagggcggctgcttggtctgctgtgaggtgtttcctgtggcagatgtgagaggtcggaagggccatctggccacattcacgagactgacactgagaaggtggcgaccactgggtcccctgcacagccatgcagctgggcagcgccgtccaggtcgcccacactctgccctcgctccacaagcactgccttggtcacagacgaaggcacggcgccgactcctgctaaggaggggtgtgcatcaggtggggctggtgctgactcggggggcgacgggccaaggaagggcccctctctgcatcagtcggacctggactcatagcccagctccctcactcaccagcctgtgtcagagccggtgacacacccatgacccccaagggcagcgtgacccccgagggtggcgtgacccctgggggtggtggtctctgaactagggagcatctgcatcccctgagggagctgcgaggacaaatcgggaggacggggtcagtcggcaaacgctcacgagcctgaggccagggcctgggggccggtggggaggagcaaaggaaagagtgaaggcagctcctgatcctgggtgatttctgtcggaggtggtggcctggctgagccgtggcccagcatggagctgtgtgggtgggagagccgtacatgcattcccttggcctcctgggagaccagaggcccctctgaccctgctgtcccctgtagcatctggtgacagccaggaccgcatcggcttcggtctagggactgagacgtgtctgatggcgtcagaactgggcctcagcagaggcgctccccgcaccagcgttgggagcgcagtggaagtggggccaggaggcccctggtgcagacagggcggttgaagcccagcctcccactggggtcatgctccctgggcctggtggctggctgccttcacggtggccagggaacctcatggctgttgtcacaacagcttgagtgccatggaccagcagccaagatggcacagcccagtcccagccggccctggttccctcgtgctacaggatacggtgttgtcctgaacataacagagcaggcggccagtccccagagctgtatgcaccccacaaagagaccccttcccagggtcattcttcatagctccccacccaggtagcggagctcctggtcagcggcggctgctgcgttcccctgtcgccgtctgcatcctccaggcatggccagagcaggttccttgaacccctgaggaagctcccttccctcctacagtctcagggctgagatgtaagcagctgaggctgtggtgcaagcagactcttaattcttgtcctgaatagccctgagcagtgtgggctccagcatctgaccacgtggcctgccccccagacctgaggaggtgaggagccagcctggcctctgggacctctgggctgttgactggaaacctcccgcggaggaggacgtaaagggagaccttgggctccatccctgctcttgcttatggcccacaggaggtcatccctagggactgagcccacagcagggggcactgagcactgtcctgacagctccagctcccaggcgctcccactgtcttgccaggctgtccgaggccaggctgtcccagggtccgtcttcaggttcggggctccctgacagcagagaggacacgtggggagggagaagacgcccctcaggctcaggctccggctgcagcagatgagacggggtcagtccttactctggatgtgtcgtgttcagatattttgcagtgaggcagcctcatgaacaggagtaatgaggatgggcaggaggggccaaggaacaaggcacaggggcaggaaggctggattccctctgctggcgccaggggaacaggcagggctggcagtaacaccacagggaggcagggctgggcacacataagacaatggtcctaaaaggcattgctcatggtggccgtgcagcgctgaccgtgatgccaagtcccgtggctggctctgctgtggggtgtctaaagcacacccggcttgtgtctgtttaaaattgaacttaggccgggcgcggtggctcacgcctgtaatcccagcactgtgggaggccgaggcaggcggatcatcaggtcaggagatcgagaccatcctggctaacacggtgaaaccccgtctctactaaaaatacaaaaaaaaattagccaggcgtgggaggctgaggcaggagaatggcgtgaacctgggaggtggaacttgcagtgagccaagttcgtgccactgcactccagcctgggtgacagagcgagactccgcctcaaaaaaaataaaataaaataaaataaaataaaattgaacttaataaaaatgagaaactgcagcatcatgggaggggaagcgccacgtaggatcataactgagtagctgctcgagctgggctgctggctggcatggagcggccccatcactcgaggtctgcttgccctgggagggcttgggaaatcttcacggccaccctctaaccatcgcttcctctcctctcgccccccatttcagcaggaaggagcgccccacctccctgaacgtgttccccctggctgacggcacggtacgtgcacagatcgggggcaagctcgtgcctgcgggggaccactggcacctgagtgacctcggccagctgcagtccagctccagctaccaggttttgtagccgtgccgtggagtgagaggctcctccctgttgctggtgttccccgttcactggggcgggagcctcgtctgcaggcagcccttcacggctctctgggccactcgccctctcccttcgtgtgtggcaggatggagaaacccagccagggtgtcaggggctcaggctgcccagcaggccctgtgtggctgtggctgttccacgcggcctcgtgtcggcacctgctagtccaggctagacctccctgcccttggatagaccgctctgtagccaggggtgtacagtgcctgtcagggttgagcttagtgatcctctctcaaaccacacccccacataaagcctcatgctcacccgggctccagccagacacatcctgcccctgagagccacgcctctactctcggaggaacgtcagtgtctagagtgtggggtttgccctccgttggcagaaaggtgaggagaaagctcctcttctctgggcccctccctgcctgtccctggtaacgcctcctgggtcctgagtttgagaaagcagagcctcgccccagcaggtactcacagccagagtgcgggggccccagcaggttctcacagccagccggtgagtgcacctcagagcacaggggcccagagccaggccactccttcagggccccaggtcgcttgctgccagttttggcctgtgagctcactggcctcagtgccaggtaaggacagccaccttcctgggaagaagaggtgaccccgggtctggtggatttcccacaggggccgtcagaggatgtccacagaggcagagcccttggggcctgtgggctgggttgggctggtggatgtggggcctgggacttctccagaagcttacttcctgctgcatgctttgccgactgtccttccacctctaagtgtccatcgtgcctgtgggggctgctgcaggctcctgctccgtcagcccacctgctgctgcgctgctctgggagcgagctccctcatggcatctggaacgctctcctgtcctccctgtgctcagggctggagagagggtggcggggctgcgggctccccgggccttctgggcccagccctgccacctgggcccacctcctctcactgtctctggctcacgcttcccgggcctggagctgggacctgcccataggcatctgaagacacgtcagcctcagccggggggagcccttgcttgacgctctctggcctccgggctgcctctcgcgcccgctctgggcccgctcttcttctcatgatgtctttcctttcacctcctgcgttgtctgacatcgtcgctctcttcataaattgtagcgttttatgttttcgttcataggagtgttttatttgatttttctttattttaaattattacatttaagttctttttattttatgctctaggttttgaagtttttctaatttcttaatttttttgttgttttttgttttgttttgtttttgtttttatgtactgtattttcagtgttttaaccaaacagttgtggctactcatggtgaggaatgaccgctaagagtttgggttctttcagtgcatttggaggtcactgctacacgttgatgtttaggaggttgagaggtttgcctttaggtaagttgtggccagggggagtgtcccatgggtaagtggtggccctgtagggtgacggagagctaggggaggcgcaatcagactgcagaattccccgcagccaccatgagggtcaggagcaggccggggacccagcgtggaggaaggtggcccagaagcgtttgtctgatgtgcacagctacaccctgcctggccacatggggttccctgttttctctctgccgggtggtggcagagtcggtgagacaccaggtgcctgtgacacattgggtagacaggttctttgagaacgtcagcacagacttcttgcatgagcggtactcgcttcctccagcgtggggagtgacatgaagagcaagggttttcctttcaaactgggcatagctgcagagccacaggccgtctcagacatttctacaaagccactccgggaggcgggctgcgcccgtgtgagggctctccctcggcactgctcatcttttggggctggacatgcatggcctgggccgctgggacgcggtgggtgtggagcagcatccctggcttccacccacgaaagccaggagcacccccttcatttgtgaccacaaaaatgtctctggactttgcaagcatcccctcggggcagtcagcccaactgagaatagctactatagaggaaggtgtgtcattttgagattccttctagagaaacttaggagcctggtagatgaagcagaaatgtgtcctctgagtgagtggccgtgtccggtactgagaggccccgtgccctgagtctggcggtgaccagagaggctgggcagaggcagaggtcagcactggccatgacttctggaagtcccgtctgccctggtcacttaaaggccagtataagtcagctgtggagagggctggataccccctcgacagctcctccctgggtgagatccttagcattagagtcccccacggtgcgccctctgagagaccacgggaacccacccagcggctgcctgggacaggcacaggagccacctgggtgcctctgaggccttgcactttcccacacctcaaggagggccgggggccacgggcaagctctgccatagcgggtgatcaggtcagctaagacgagaacgtttggggctctttttctccagctggttcagtatctttgttaggaaagaccattggaaagaatgtttgtttcgcattccgcattagtcacatagaatgcgctcctccctagcgagcttcctgaggtagacggctggttgcggtttctcgtaatccgggctgcccccaccctccagaatgtcttggtggcgtccctttctgtgagcagggattgtggtttctttgcgcttgctcatgttcaggggtgagctctggtccagtcaagccacagggtcagcaccttctggtcactccctggccctgacctgagcccggggaggaacgtggggcaggcgcgggtgggcccagcctcgagctcttcagcacagtgatggtgacggggcagcggtggcggcacagccagcccttcttgggtccccagtcagagccctctgccctacctgggctggacttgtttctgaacagccacaagctacagggggctgccgctgtgtccctggcgaggcactggcccattacaagcaatcgtctggggagggcaccagtggaaagccccgttccaagccatttcaggagggtggccctgcttccgaggagccggagtcagtggccggataagcagagccactcgggagtggtgaggcccggaagggttagcccggtgggcggcagaggagctctggcccgcagggtgtcgggcgaggcaaagtgcaaagcattggtgcgcggggcctcaggcagccacggcggagccgcaggccagggacctgcagtgactcgctctccctcctccctgtgtttggccttagtgtccacaggatgaaatgtccgagtcaggccagtcctcggcggccgccacacccagcaccacaggcaccaagtccaacacgcccacatcctccgtgccctcggccgccgtcacacccctcaacgagagcctgcagcccctgggggactatggcgtgggctccaagaacagcaagcgtgcccgggagaagcgcgacagccgcaacatggaagtacaggtcacccaggagatgcgcaacgtcagtataggtgggtgcccacctccgggactctgggctccctcgggcaggaggcagggcttggtttgggtagatgtgaaactaatgcaccaggcgggcagtgcaggcagcagagacgtgttcctcacagcccggaggctggggtccaagatcaaggcgctggcagggtaggttcctcctgcggccactccttggcttgtagacaccaccttctccctgtgtcctcaacaggcatcccctgggtgtgtctgtgtcctcatctccagctcctacaaggacatagccccattggattagagccaccacgtgacctcattttaccataatcacctcttgaaaggcccagcctccaaatacagtcatgctagggggtatctattaacatatggatttggggagacacaactaaggcagtagcctgcgtcaccccacggcacacagccccactaaccagtaacctgcatcgccccacggcacacagccccactaaccagtaacctgcatcgccccacggcacacagccccactaaccagtaacctgcatcgccccacggcacacagtcccactaaccagtagcctacgtcaccccatggcacacagccccactaaccagtaacctgcgttgccccacggcacacaggccagtgagggaaagagaagaggggaatgagggccgagaggaggtccagccactggcttgcttggacgtgggatctctggggactgggcttactgctgacactcccatgcagagaggctgctgcaacccaccccgctccaggccccgcctcagacgtctactgtgctggggttcgacctctgcccagtcagcctgggaagagctgttttctgatcatccccacctagcaggtggtccagctccagcccaccagactcaggttccgagggcagccgtgagcagggcagaggctgccagaccctctcctgaccccaggtgcccctgtgctctcccctaggcatgggcagcagtgacgagtggtctgatgttcaagacattattgactccacgccagagctggacatgtgtccagagacccgcctggaccgcacaggaagcaggtactggctcagcccaggccctggggtcctgggggctcagtatttatccaagtcggtgtctttggtgaagtcttcctctgccaccactgggagaaccatcaaggctgtggcctaccgcctccatccacgaccggcctgcagggcagtgtgggcattgaatggccacggtgggaggtgttggaagagtctgcagacgcagccactccgggctgcccactgactctgctctctctcccgacctgtggatcccaacagcccaacccagggcatcgtgaacaaagctttcggcatcaacaccgactccctgtaccatgagctgtcgacggcagggtctgaggtcatcggggatgtggacgaaggggccgacctcctaggtaagcgcaagccttcccccgcaccgctgtgcctgcacaatgctggggctttctgctgttggttttgtttgtaatgaaaggaaagtcctctgtcagctgtgagctaggaacctttttttttccagctttgttgagttgcgtttcacatggaattgtccctccatctccacaggggattggtttctggactgccccaaggatgccaaaatctgaggcttctcaagtccctgctctgaagtggtgtagtgtttgcaccctcccgtgtactctaaatcacctctaggttatgttgtagatgctgtgtaagtagttgctgttatgctgtgtcgtttagggaataatgacaggaaaaaagtgtacacgtcagtacagacacggccaccacaggcctgtacattttctgtgaggctggttgaatccacacatgcagaactcgtgggtattgagggtcgactgtatcataaaattcacccgcttcgagtgcacggtgcggtgggttacagcgtactcacaggtggggcagccacccccatgatctcagtttagaatgttccgccatccctaaaagaaatccatgcctgttagcctcgccccatcttctgcacacaccctcagggctgccaactctccaggaggttgggagggtgcccgcttctctgctctgtgcccattagcctcgccgcacaccctaggaccattgactttggaggaggttgggagggtgcccacttgcccactcctccgcagacagccctggcttcacctcagcgccacaggtctacaccggacccctgtgcctaggtctgtggcggctgcaaacatcaggacctgcttcctgtcagcacgtggagtctcctgtgctcatggcatctgctggcagctgagcactggccatgtggctctgagccccaggctttcaggcatgacaggcgggcagtaggacagcgcagtctgtccccttgcacgcgtcagggtccgagcctttcgccatggccttgcttcccccagcccgcagggtgagaagctcctggatcccaggctgcctcctggtgtactcctgagctgattgtcttatctggggcagggggacctccagggagcagagtaatgtggggtgctgagcaccagcagggcctcaccctgacagggaggcctgtctcatcctggcttgagtcagaaagtgccccagtagaggccatgtatgagtaacataatattcaccatgttaaccgagttgaagtgttcagttcagtagtgttggacacactgtacttggtggtgaaagatggaatgctccccgagatcaggacggcggtgagggcgcactttggtgctgtgaattttctgtggaacttttctcatgtgttgcaaaaatatatataaaaaatccaaaggagattaatcttcagaaaaatcctgctaaataggggtaatctcttttaatattttgctatccttccactctacataattcagataatgtttatttatttatttatttatttatttcttagacaaagtcccgctctgtcgccaggctggaatgcagtggcgccatcttggctcactgcaacctccgcctcccaggttcaagcaattctcctgtctccgcctcccaagtagctggaattagaggcacgcgccaccacgcccggctaatttttgtatttttagtgcagacggggtttcacaatatttgccaggctggtcttgaactcctgacctccggtgatccacccgcctcaggctcccaaagtactgggattacaagtgtgagccaccatgcccggccgataatgtatattttttagctattttttttattttttgaaaaaattatatatgcttataataatatttaaataatatcagcaaatgccaagaagagagtaaaaaccagagggaacctccccaccatgctataatgattttttttttttttgagacggagtcccactttgtgggccaggctggagtgcagtggtgcgatctcggctcactgcaacctctgccttcccgggttgaagcaattctcctgcctcagcctcgtgagtagctgtgattacaggcatgcaccaccatgcccaggtaatttttgtatttttagtagagatggggtttcacagtgttggtcaggctggttttgatctcctgaccttgtgatccacccgcctcggcctcccagagtgctgggattacaggcgtgagccaccactcctggccgattgttttaatgtcttggtgacacctaccagacaccatggcccatggcccacagaggtatgacacatgtgtacgcagaacacacagtgtcaggtcgcagctgcccttctcattgtgggcggtgtcatttccgtgggtggcagcactgacgggcacggccaccgtcggtccttactgcagcatcaagccgccctcctgccagtgtccccatttatagatgaagaaactgaggccgggcacagtggctcatgcccgtaatcccagcactttgggaggccgaggcgggtggattgcttgaagtcaggagtttgagaccagcctggccaacatggtgaaacccatctctactaaaaatacaaaaagaaattagctgggcctggtggcgggcacctgtaatcccagctactcgggagactgaggcagaagaattgtttgaacccaggaagcggagattgcagtgagctgagatcgcaccattgcactccagcctgggtgacagggagagggactctgtctcaaaaaaaaaactgaggtcagggagggtgagatgacggtgagagctcggacttgaacgcaggtcccacccagaacagcagccctaactctgagcaaggtctgtgctgttcagtagctctattgagatgtgatttccacactgtgtaattcattcacttacggtgtacagtccagtgggtcttagcatgctcggtgttgacagtcacatcgtcttcacccccaaaaggaaaccccgtgcccatgagcagtcgctttgtctgcccctcgtccccagccccaggcaaccacaaatccatgctctgtctctgtagatttgcctgttccagacgtttcacagcaatgggccttttctgcctggcttctttaacgttgcatcacatcttcaaggtccatcccagctgcagcgtgtcagtgcctcctggcttttcactgctgagtagtgcccgttgcatggacagaccacgttgtgctcacctgtttgccctaatgggcccctgcttggtgctttccacctttgggaggctgtgaatcgtgctccagccacactctgacccccgcccggctccaagagatgaccaggattggcagcttcctcaccaaccagggactctgtggcctgcgcatccgcccatcctgttggctgtggtaccctgtgctcaacccgtggcctttgtgctgcctcgccctgctgcacagccaccccctgcagcacccacctagagggcactggccaggagtctgctttcccacgagaccgtgaggcagtccttttctcataccacgatggaggccgagtcactgtgcgctccacgatgaggctgcaagtcactatgcgttccacgccctccgtgcactctgggctctgccaccctactctgcagggtgctggtcatctgggcatcgccgagctcaggctggcacgacaggctgctcttgggagtaacagaccttttggtgcctttccagagccttaaacgtaatgcgtataagaaaggcagggaggccaggcacagtcactcacacctgtaatcccagagctttgggaggccagggcaggaggatcacctgcgcctaggagttcaagaccagcctggtcaacatagcgagaccccatctctacaaaacattttataaaaaaattaggcaggcatggtggtgtgcacctgtaagtcccagctacttgggaagctgaagtgggaagatcacttcagcctgggagtttgaggctgcagtgagctgtgagcacaccactgcactccagcctgggtgacagagtgaggccctgtctcttaaaaaaaaaaaaaaaaagagagaaggaaaagaaaaagtcaggcagtcctgatgagtggggacctcctgctgctgcaatctgttgatggaaggtttttgaaacagaggagcctgctctctggcaaccaggatggacaaatgagctgggacctgcgcccctctgccctaatcaactcgccccatgtccagctcagctgcagaatgggcatgaactcctgaagacagcaggaaaaggagtacgcccttgtgtggctgccaagcaggggagagcctggagcctgcacagatctgggaaagagcatcatttcagaaacacgtcagctttgcacgtgacgggagggtgcttctgccaaaagtcggcaggtggagagcgacatccctccgtccagcgtctacgtgggcggccctgcacctctctcagcatttttactctgagttcctttggtgatggagaaataaaaagagcccaggtcgggcatctgttgtattccatcgaatctcagacaacaccaattttaagacttttttgtttgttcgttcgtttgtttcctatagaggtaggctgttgctgtgttgccagggctggtctcaaactcctagactcaagtgatcctcccactttggcctcccaaatcacactggaattacaggtgtgagccactgcacccagcccacataccattatttatttatttatttatttatttttgagacggagtcttgctctgttgcccaggctggagtgcagtgacacgatatcagctcactgcaagctccgcctcctgggttcacgccattctcctgcctcagcctcccgagtagctgggactacaggtgcctgccaccatgcccggctaattttttgtattttttagtagagacggggtttcaccatgttagccaggatggtctcgatctcctgacctcatgatccgcccacctcggcctcccaaagtgctgggattacaggcgtgagccaccgtgcccagccccacgtaccattattttaggaatcttcaagaaagaaaaaactgctgcaaattaaactataatgtgacagtgattgtttaagacctactgaaatttcagaaatgttaacatgaggaaaaaaatgtacgtcttagaattggtatactaggaccggccgggcacagtggctcacgcctataatcccagcactctgggaggccgaggcgggtgggtcatgaggtcaggagttcaagaccagcctggccaagatagtgaaccccatctctactaaaaatacaaaagaattaactgagtgcagtggcaggtacctgtaatcccagctacttgggagactgaggcaggagaattgcttgaacctgggaggcagaggttgcagtgagccgagatcgcaccaccgcactgcagcctgggcagtaagagcgaaactctgtctcaaaaaaaaaaaaaaattggcctaatagggagtaagggaattaatactcactgagtatgtcgctggtgctgggagctgtaccagctattaccgcactacctggtgggaatttcacagcaaatattcactaaggaacttatttttctgtttcacaaatgactaatactcagagaagttatactatgtgccttgcattgctgagcggaatctggaatccacgcagctgatctttctctccgctctgctctgcatggacgaggcagccctcaggagagattccaccgatgtagtagccagatgtagaaactgtccacaaataggccgggcacagtggttcatgcctgtcatcccagcactgtgggaggccagggtgggcggatcacaaggtcaggagttcgagaccactctggccgacgtggtgaaaccccatctctactaaaaatacaaaaattacccgggtgtggtggcgggccctgtagtcccagctactcaggaggctgagacaggagaatcacttgaacctgggaggcgggggttgcagtgaactgagatcatgccactgcactccagagcgagactccgtctcaaaaaaaaaaaaaaagaagaagaaaatatccacaaataaccttgagaaaagacaagcctgtgtaagattcagaagcaccattgaaagacataaaagaagctgtacacgcagagggtgttgccacgtgcccggacctgaagacacaccctgtgagctgtctgctgacatgacaggcagccccaccgttcccacaggaatccgttcattaccagtaaaaatacccacatgcttgttggagatttttctggaactctatgaatggatctgaagttgatccagtagaggaaacatgtgagaatatcccagaaaatgtggggagagaaaaagcttgcaggattccacataaagctgcggcagttgaggcaggcagcaacaaacctgtgatacgagctcatgagctcagggccaagagccaagacagacctggagccatggggaattcatctatgtatgacaagtatggcatctcaaaccgtggaaaacgggcagatgagtcagtaaatgtactgccttagttgctgctggtgtaaaatgaagtctaagcctgacctccccgtaaacagcagtgatttccaggtggattaaagatctaagtacacaattacgaggacaacagaatgcagccgggtgtgctggcacctgtggtcctagctacttgggcgtctgaagtgggaggatcacttgagcctgggagttcaaggatatagtgagccatgattgtgccactgcactccagcgtgggggacagagcaagaccctgtctcagaaaaataagaacgtcaacaaaggatagtagaactggaaaaggggccgggtgcggtggctcatgcctgtaatcccagcacattgggaggccaaggtgggcggatcacgaggtcaagagatcgagaccatcttggccaacatggtgaaaccccatctctactaaaaatacaaaaattacctgggcctggtgacacatgcctgtaatcccagctactcagaagactaaggcaagtgaatcgcttgaacccgagacgtggaggttgcagtgaagtgagccaagatcgcgccgttgcactccagcctggtgacagagtgagagtctttctcaaaaaaaaaaaaaaaaaaggaaaaggaagtttataggctataccaataaacatctgaaaagatgctcaatttcggaaataataaagaaataaagagaaaatcaagaaaactttttccctaaaagattgaaaataagacaatcgaggctgactagggtggagcaggtgctgccctacgtgccagccaggggtgatgggtgcagccccaccgagcactggcgggtggtaatggtggtggaccagcagctggagatgctccttcgagggagcagtcgggcagtcacagggctgaaaagtacctcaagccctcacacagggaccccaagtcttgggggagcgggtacagtgacagatgatgagatattcccatagagaaacactacagggcattgaaagcaaccaggccaggggcggtggctcatgcctgccaaggcaggtggatcatttgagctgagaagttcaagaccagcctgggcaacatggcaaaaccccgtctctaccaaatacttagctgggcatggtggtgtgcacccatggccccagctacttgggaggctgatggggaggattgcttaagcctgggaggtggatcgcgccacttcactccaacgtgggtgacagaacgagaccccatctaaaaaaagcaaccggggtcaggcacagtggctcacacccgtaatcccagcactttgggaggccaaggtgggcagattgcttgagcccaggagttgaagaccagcctgggcaacatagtgagacctcatttttactaaaacacacacacacacacacacacacacacacacacacacacacacacaaattagccgggcgtggtggcatgtacctgtagactcagctactcaggaggctgaggtgggaggatctcttgagcctgggaggtcaacgttgcagtaagctatgatagtgccactgcactccagcctgagcaacagagtgagaccccgtctcaaaaaataaataaaggcatccaggaacctcagcacaggaaagtcccataaaagtgctgagtggaacacaggaagcctcccagagagatggataatggggtcccgtttttgttctttgaaacctgttgcttatctagaaggaaacctgagaggagaatattggccgtgagcagtggttgccctgggaagccgagatgagagagaaggacatctgctctcgaattgggaattgctttattattggaattccgataacaaacagccgttttgtcatctaaatcaagtgacattttttttttaattgaggcggagtcttgctctgtcgcccaggctggagtgcagtggcgtgatctcagctcactgcaagctctgcctcccgggttcagccactctcctgcctcagccgcccgagtagctgggactacaggtgcccgctaccaggtctggctgattttttgtatttttagtagagacggggtttcaccgcattagccaggatggtctcaatctcctgaccttgtgatccgcccgcctcggcctcctaaagtgctgggattacaggcgtgagccaccacgccctgctcaagtgactttttaatgccattttcctttctgtgtgaaacaaccaagtagaagagaaccgcgtcctcacctctgttggaggaagtggtgttttcccgcagagcgtttccctcgccagcctcctgtgcagggaggggccaggacccagtgaggatgcctcgcccgccccacgctccccagccctcctctgctttctggcatgttctctctgccctccacagtggggcccttgctcccattgtgacttcagtcatccttcaccgaggtcctgccctacccaggctgacccagaagcctaggagtccagctccaggcctgcgtctgcggtgtctccctcgccgctctctccctcgcccacgctggggggcttttggagactgggtacctgccacaccctgccacacacactctcctcttcacaggcctgcatcatgggggctgcggggggcctgccctcctgatgggcgatgggagcagagggcagcaggcttccgggtcagggctcggcaacacagccctgggctggaccacggcgcctgggcctggttccctgcaggcctctgcctgggcacacggggcaccgggacctgctggaggctgctccctctctctcctgccctgcaacatgggagcagccgaatcattgctgggttttctgtaataagaatgtattgttagttccagtccctaattgacctttgtcccttccttcccctgcctctctgtgcgtcgctggactcgccaggggagttctcaggtgagtatctcactctcctgtctgtctcccctctgtgtgacggggggagtgggtggacgggggatgccccgagctatcccgtcaccgtggctgtgtggactgccccccacgtcgccgcagcgcctctgcttctgctcgcagccaccgccgctcggaagcttgttcggtttgctccaccagccacttgacaatgacctggatatccaacccccccagcctgaggagtcccccgcgggccatttctgaaggccctgcggagccctaagccacgcacggcagtgactggacatggccaaggccagctctggggcctcccctgctgtcaggcacaccccagaagtcaggggtccttgaagcccctacgaagcccagcccggggtcccctccccacgtgggtggacaggccgagtcctgctctctggctgcacagcaggaggctccgaggccccacccagaggctgtccagatgcagccccccagcctccaggcacagcccatccccacaggggtgccttctgccctcagccccacccagcccagaatttggggtgagatgttagcttcctgctccacaggtgacactggcctggcagtcttcatgtaaccccaaggataaactttccagaaggaatagctggctccatcccatctcctgccctcctaactccctcctgcacccaccctaacccagcagacccagctctgaattcctcccagcctgctgtccacacgggcttaacgcgcttctcttctctccctttctccctctcctcccgccctggttgcccatctcctgtgggacggggacggctccctagtgcgcgatgatttctttggtaaggctgaggccccgttccagcgtgcgtcgctcctccaccccgacatggtctcctgcttcatgagccgtttgctttgttctgcatgatggggacagtgttggggccgccggggtcaggggggcagccctgagtgaagctcgctctgtccaggctgcctctgggctgtgggaggtggcgacttccccaagggacagacttgaaggcccgaggagggcagccccagcctctctgaaccccacaagcgccgggcagaccctgcctgtggggaggaaggcccatgtttgaggcaagggaggtcataatagagacagcaggcaggacccctgagcccaggcacagaggcgtgtgatgctgtttcatgactgcatacacagtgggggagtgtgtgggagggcaggaccttggagtttctttccatccttttggggtttctggggcatgcttgcagggagatcagtccaggtccacttggggcctcgtggtagaggagccttcagtcctgccagggagccctgtcctcacagccgcgccccatcgccgcaccccagccctgctggccctgccgtgagggccaggcctctccttgcccacctgtcccctcaccgcagctccaacatcactcgcctagggtggtggctccgagagggcctgcctggtgacagacctgctgggggcactgagatggcagcccagcggccattcaggggcctgcgtccggccagctggcctgtgacattggtcggacatgagaaccaccccaaggcctgggagcctgctctgtgcacagactgcgggcccagcatgagccccgcccttcacggcccccgctccctgtagatcgggcgtcatccccagccaggctaccctctttggaagcgttgttgccctgaggcaggtgcggcggcatcagtgacctgttttgaagggcacaggtgaaacctccgcaccttctgtttcaggaatgggcaaagaagtggggaatctgctactggaaaactcacagcttctggaaaccaagtaagagtgcccttctcctgtgtggtggggctgaggcagccctccttgtcagggctgggagagtgagccgggccagagggcgccttggggagcacctggctccaacgccagcagctgtcctcatctctggcgggaggaacttggagcaggactctgcctggtttctttacgaagcttgtctccaggagcctctaacaagggtgctatagggtttagctaagatggggatggggtctcccattcagccaccttcctaaccaggctgtgccttctccagggcggaagtgcaggcgcccctggcaaggccccttcacgtacctgtatgccgcgcccgtggcactcccatctttctgctttttcaaagaaacgccttgaatgtggtgaagaatgacctgattgccaaggtcgaccagctgtccggggagcaggaggtgctgaggggcgagttggaggctgctaagcaggccaaagtcaagctggaaaaccgtatcaaggagctggaagaggaactgaaaaggtgagggcagggcatggaaagctggtcagagagggaccccggcctcagggctctggagtggctgcctcctccagtgcctgctctccagcctgagcggctctgtgcatagcctacctacctccagctccagctcacagccactccaccccaaccagcagagtggggccgtggtctcctcctgagcctcctacagcacacgctgggcctgtctcacgcgttccttctctgcacagctcccaccatcccactcctccagccctttgatcagccaaggtttggccacggcccccggagagctgtatgttggggctccagcccttctctgatggacagaggaggtgtgggcgctccgagaccatgcctctgcctaagaagggacccagatctgctctgggtttgccaaagccagggcccctctgctttgctccccctccgcattcccgggcagccaggatggacggctgggcttcagagcactcatgcagcagtggctcagggccacctgtccccagggaactggaagaagcgttcagggccctgaaccaaacggctgctgaaggggtccctgtggggagagcccccagccctgcacagaggcaaggacacaggttcggggcgggcactgcccgctatgtgttcccgaggcccctgggaggccctcaccctccctgcctccttccccttcccacagagtgaagtccgaggccatcatcgcccgccgtgaacccaaagaagaggcggaggatgtaagcagctatctctgtacagaatcggtacatccactcttcactcttcacatgcggggcgtccaccattcacttttcacaggcggggcggccaccgttcaccattcacacacagggtgaccaccattcaccattcacaggcagagcggccaccattcaccattcacaggcagagcggccaccattcaccattcacaggcggggcggccaccattcaccattcacaggcggggcggccaccattcaccattcacaggcagggcggccgccattcaccattcacacacagggcgaccaccattcaccattcacaggcagagcggccaccattcaccattcacaggcggggcggccaccattcaccattcacaggcggggcggccaccattcaccattcacaggcggggcggccaccattcaccattcccaggcggggcggccactgttcccacacattcacacgccgggtgaccactgttcatacgcattcacacgtggggcagccatcattcccacacattcacacgctgggcggccaccattcaccattcaccattcacacacagtatatcctactattcacactcggggcatggggatgcggggtgcctcccggggactcaccggcgcttctgtctctgtacagaatcagtatatcccacaattcacatgcagggctggggtgggcacgggcagggggcccaggcgggctcctggggactcgccggctgttctgggctgacagctctcccacccctcctgggtgacacctgaccccagcggcatcatctgccaccccactcctgagaccacatggagtcagaatcaggcccttgggcaggaccacagccctggcaggatgccgggtcccctgtcagcacccaagtcctggtgcatgccttttgtatggttcccctccccgcttgccgacacccctccacaccgcttcttgcctgaggatctgaaggaaattggcactgagatccacctatacgtgtaggcaccccaggaggaagcaggtgtcacccggcctccgagggctggctgagcctctgtgcccctccctccgcaggacaaaatccccatggcccagcgccgccgcttcacgcgggtggagatggcccgtgtgctcatggagcggaaccagtacaaggagcggctgatggagctgcaggaggctgtgcggtggactgagatgatcaggtgggagttgcggccaccccaggaggggctgcgggatcatccctgacggcaggactgcggctccctcctctgcacctccctgtcttctggggggactgaagtgcgctgggtgcttcctggcgggagccagagagtcgcaggtaagggaggcgtgagggcactagcaggttgctccctgtgccctcccctgcagagcgtcccgagagcacccatccgtccaggagaagaagaagtcgaccatctggcagttgtaagctgggggcccctgggggatgtgggcagcagctgcaggggaaggggcagggaggttccctggtcctctgcccacccctcacctccctgtgcctctggcagcttcagccgcctcttcagctcttcctccagcccccctccggccaagcgcccctatccctcggtgaacatccactacaagtcacccaccactgccggcttcagccagcgccgcaaccatgccatgtgcccgatctcggcaggcagccggcccctggaattcttccctgacgagtgagtgtcccgcagcccccacttgtggcctgcaatggggttggggaggccctgtcctgaggctcctcccctccaggccctgaagcgggactttgagggcagcctccaccttgctggccacatgccaggggccgtgacctctccctgcacactgcctgcccctccctgcagcggggagctgggctgctttggctccacggtatttggttcaggatgtcccttggcagaggctgtgcccaccaacagtcagggggctgtgctgggctccacggtggcctctgcagcaaggagccgtttcaggcgtctgtccagcagggagtcgctggtcatgcctgtgccccggcggcactccaggtcccggtctgtggaaccctcagtgactgtggcagcagagcagcctctgggtcgagcaggggccagctgtggcctccaagcccaggggcatagccggtgccaggaaagccacccttcccagctgggcacccagtgccgggaaagccacccttcccagctgggcacccggtggccgggaaaaggcgaggatgggcccaggcgggcctccctgccgtgacctcccccaggacaagcctggggcactgtgggggccgctcaccctggacagagacatcacccatcattcttccactcagcgactgcacgtcctccgcccgtcgagagcagaagcgcgagcagtaccgccaggtgcgtgagcacgtgcgtaacgacgacggccgtctgcaggcctgcggctggagcctgcccgccaagtacaagcaggtgcgggcgggcgctgcggggaccgggcggggccccgcagaggcggggcgggggtaaggggcggggcgctgtggggcggggagagggcggggcagtgctagggggtgggagaggacggcgggtggggcggggcctggcaggttcctagtgagcctcctgggcaggggtctggagggtcggagaaggagccccgcggctcccacgcccccacctgcctccagtcttgaagtggctgtgccgccagaagctggcagccctacctgtctcagatttctggagggatgggtaggagccagggttcgtgcccacggcgcctccctgctccctgcagctgagtcccaacgggggccaggaggacacgcggatgaagaacgtgccggtgccggtgtactgccgccctctggtggagaaggaccccaccatgaaggtgagcccgcgaggaccccgctcaggctggctgggcgagcgggaggctggggagtgccggtgacacccgacctcggccctgcccttgcagctgtggtgtgccgcgggcgtcaacctgagcgggtggaggcccaatgaggacgacgctgggaatggagtcaagccagcgccaggccgcgatcccctgacctgcgaccgcgaaggagacggcgagcccaagagcgcccacacgtctcccgagaagaagaaggtgagcatggccgaggccaccgggcaccctccctggcttagtctcaggacagctcagctgcagagcatgctgggagtgagacacaggacagctggggacagcacccggaagcagggcagcgcaggggctcctagactgcgggaagcagtgtcttccctcaccaggactgagccgccttctgggttttcagttttcaccccccaggtggcctggagtgggcctgcactgggctgcaggggtcaggcaggcagcaggcacagaggagcccaggagcggcagagcttgcctcccagtggtgggaggcttagttttatgcccagcttgggcctcttggagctcaggggcctcttctgtggaggcgaaaccgtgtctgtgagtgctttagagtgcagtcctgagtccgcattgttctggtcctgggggaggacagccatgtcccctcaagctgtagtcaaggctggatcctgacagattctgggagccccatggccctgtgctgccaccgggtagcctcaagctcgggctctgaccttgatcccgtgccctgaaacaggccaaggagctccctgaaatggacgccacctccagccgggtgtggatcctgaccagcaccctgaccaccagcaaggtggtgatcatcgacgccaaccagccgggcacggtggtggaccagttcaccgtctgcaacgcgcacgtgctgtgcatctccagcatccccggtgagcagctggagtgggcgtttccactcgggcgccactcccttttactagcaagctaagtaaaagccctgccacacagcagctgccttctcggggtgtcctgtggacacgggaatgtggcagtggacggtgggaggggcagcacccagtcaagtgaggccctgggccctgtttctgggaggaagctcgcggcagcctcggcctcttctccctacctactcaggaccccacgcttacctggttagagggtgacgggtgggcacggcctgcagcttgaagcatcactcggagaccacaggaaaacatttcctcatgctgaatgtgaaacctccagttgggccgaaggggctatgggggtgtgggtgaggagcttcgtgtcacccctgtgggcagtagccttggtgatgttctgggccagccccaacactgggaggacgaaggggtgccgagggctctgccaggtctctggtgtgaaaccacagggccgtctggggtcctgagggtctgccacaggatcacaggttgtttgctcccagaaccagagtcttactactcagctccccttggcccaggggcctacccaacagagcaggcttgctggagtcccagacctccaggcagagggtcgtgggtgggctgtgggtggagcatgtgtggaagctgggtctgctgggaaagtggaaggccagccccggcttcctctgcccctgtgtaagtgctgggcacgcccttgcagtagtgggttcccccgcacaggctgacgggctgtccctctccccagcggccagcgacagcgactaccctcccggggagatgttcctggacagcgacgtgaacccagaggacccgggcgcagatggcgtgctggccggtatcaccctggtgggctgtgccacccgctgcaacgtgccgcggagcaactgctcctcccgaggggacaccccagtgctagacaaggggcagggtgagtcctgggcgagtttcccccatcccctcattcccacgtttctgcccagcccaagctcacctctcctaacacaggggaggtggccaccatcgccaacgggaaggtcaacccgtcccagtccacagaggaggccacagaggccacggaggtgccagaccctgggcccagcgagccagagacagccacattgcggcccgggcctctcacagagcacgtcttcactgacccagccccgaccccgtcctctggcccccagcctggcaggtgagctcttgggctggggcaggagcagagggaaggcttgcagaggtgggaagggcctcggggtcttggggcaggtgcgtgctccgtggccccccctggagccaccgttcttcctgcagcgagaacgggccagagcctgacagcagcagcacacggccagagccagagcccagcggggaccccacgggagcaggcagcagtgctgcacccaccatgtggctgggagcccagaacggctggtaggaagggcccggggcaaggtggagggagggtcctgggtgagcccctcgcccatcgccgcttccttccctaggctctatgtgcactcggctgtggccaactggaagaagtgcctgcactccatcaagctgaaggattctgtgctgagcctggtgtgggtgaccccagaccgagggccgggcggcgcgggggaacggggcggagggggctggcacagcctggcccaaaccaggctcaccgcattcctgtttcaggcatgtcaaaggccgtgtgctggtggctctggcggacgggaccctggccatcttccaccgtggtgaaggtggggcctggcagcacggggtgtgtgggtggcagctgatggccctggcattgtttagccaaggggctcccggggttccaggcctctccttagtctggcagtgggtgtctcaacccgatgccctgagcagaggtggggcctggccaggcctgagcaggtgtccggggctccctccagatggccagtgggatctgagcaactatcacctaatggacctgggccacccgcaccactccatccgctgcatggctgttgtgtacgaccgcgtgtggtgtggctacaagaacaaggtgcacgtcatccagcccaagaccatgcagatagaggcgagtgccggccagggccccggggaggggaagaggctcctgctggccagcagctctcccgcatcttccatacggaagtccacgaggccctacgtggggcccatctcccctgtaccacctatgactcaggcttgaacaggcgcaaagcaggcgctggctgggaggtctgaggggactgcaggtggccctggagctgtggcaggtttggggctccccacttcctctcctctccccagccctgttgatgggcagccatgactccacagaagtcatttgacgcccacccgcggcgggagagccaggtgcggcagctggcgtggatcggcgatggcgtatgggtgtccatccgcctggactccaccctgaggctctaccatgcacacacgcaccagcatctacaggacgtggacattgagccctacgtcagcaagatgctaggtgaggggccacgccaggtggggtggtggggggctcaaggccagccaccctgaccgctctcccccacaggcactggcaagctgggtttctccttcgtacgcatcacggccctgcttgtcgcgggcagccggctctgggtgggcaccggcaacggagtggtcatctccatccccctgacagagagtgagtggcctgcacccctgcaggggcagtggtgctgccagaggtgtacgtgggttcacggggtggctctgcagggccaccttggagggtgccttgctgcccctacgctgaccgctctcctcttctcccatgctcctcccatgtccccagctgtggtcctgcaccgaggccagctcctggggctccgaggtaagcccagccacctcgtgtcccctcacaggagcctctcccatcctccacctgtatgcgggctcagcgcctctgggttctctccctgcagccaataagacatcccccacctctggggagggcgcccgtcccgggggcatcatccacgtgtatggcgatgacagcagtgacagggcggccagcagcttcatcccctactgctccatggcccaggcccagctatgcttccatgggcaccgcgatgccgtgaagttctttgtctcggtgccaggtgaggctgggcccctcctgccatccacatcccctgcatgccagtggccgccgcctcccccaggaggccgctgtcctgaatcgcttctgccatcccagggaacgtgctggccaccctgaatggcagtgtgctggacagcccagccgagggccctgggccagctgcccctgcctcggaggtcgagggccagaagctgcggaacgtgctggtgctgagcggcggggagggctacatcgacttccgcattggtgagcggggcccagggacagggctgaggttgggcgcggggggagcctggccctcactctgctgctttgcccgcaggagacggagaggacgacgagacggaggagggcgcaggggacatgagccaggtgaagcccgtgctgtccaaggcagagcgcagtcacatcatcgtgtggcaggtgtcctacacccccgagtgaagctgctgccctgcctggcccgacctgtacataggacccccgaccacctgacccccgcccggcccgcggggtagccagccaggcgccgccgcccctcttctaacctctcaacctgcagctttcacctgagtctggcccctccagcgggcagggagtgcggggatgcggatcagctgggaggaggaggggaggggtgcttccacccgaggggaagatgctctcgggacagtttcccgggcagctcctggccagcttccagcccagagtcctcaagtccagggcaccttgggcccagcgcaggcagaatccgaggtggtcctggctctaccctgggcctcctactccccagcacccctggaggaggcaggggctccccgccgccgaggctgcctgccctgggcccacctctgcatgctgctcatggggccaccctgcctcctgggccctcactctgcctaggggagctgggccaggcactagcctttgcccagggaggtgggcctcaggctgcccaggtgcctgcaccccagccggccttctctggggcctccccgtcgtcaagcctctatcctgtctgtccccaccccagctgtcccctgcccagggaactggcataaaagcacgaggcccggctccctggggcagctgcttgagaacagagactgctaccccatcctgcccatgcaggcaggctcttgccagccccgttctgacccgtgtccccccaggctctgcctgggcagaagactcaccttggaggagtgggccctggagtcctgtccctcccagaagcccccagggtgggatttctcaggctgccagggcaggcccaggcctcaggaagaaggggaggcccctggcctctccgggatcagtcctaggacacaggctcagcctcaggttgatgggggatgatgtgctcccggggcctgcctcctgcacggggctccacggagcccagctcccagacacgctactaagtgcctagggttgcccgctgtggcctgctcccagggagcaacagagaggccaccaagcagaggcccgtggggctgaggatggagccgcccccagccgactccaagcccgcagagggcagacgccaccctggactgctctccctgcccagctgggcctctctggcctattcctaccttccaggcccactgcactcctgtctgggaggcccttatgagggcagcccagcccccgcacccacccccaaccagagaagcacagatcttggggagctgccccacaagccccgctggccaccgagggctgcagccgctgcgctgccggcttctccccaccaccctgccacctccactgtgatgtatgtccgctccctcgtctgttcccccaggatctcgaagtgactccgggctgagcagtggggcggctgggggaggggtgacgattctcctcaggctttggccctgcaagcaaacccacatatctgctctgtatgtaataaatgtcttaacgtcgtagctgcctgttcctgggcccaaaccgaaacgaaaacgaggactttattataaaaaaacgttggaccacgttgggctgggcaccaggacagtgtcctggcacgtttccaggcgagccgcgcaggctcctggagcagctcctcgggcaggaaaccctgtacgccagggattggagaggcctgcgccaccctccatgcaacgtccagacaggtggatgttcagcagcccgtccaaagggatgctccaagcgctgtggggtggggccagaagcccgcccacctgggccctggaggaggctggagtgtgagagcctctgtgacgcgcatctgccgggctactcatacagccagtgcccagcgctgtcctcccagcagaggagctcgtctgcgcggaaccagagagcgatctcgcggcgggcactctccaccgagtcgctgccgtgaatcaggttcctgcgcggaagaggcgcgtgtgagcgtgggaaagagacctccggcacgggtaccacgcaggctgaacagggggaggccggacggggctgggaccgtccccggggcgggccttacttgccaacctcgatgcagaaatccccgcggatggtgccgggcggggcgtcggccgggttcgtggctccgatgagcgcccgcgaggtgcgcaccacgtccagcccctgccaaacctgtgcggaggaacgggcgcggtatcacgcgggggtgggggtcccggagccgcccgcccgcttcccggatactcaccatggccaccaccggcccggaggccatatacttgacaaggcggccgtagaacgggcgttcacgcagctcggcgtagtgctcacgcagcagctcctcggaggcctgcggaagggtcaggccgcctgcgcccgcacccggcacctaggcgtccccaggtccccgctccccttccccccacaccgcgcccccgctcgctcaccgcgcccccacctgcaccagcttcagcgccaccaacttgaagcccttcctctcgaagcgccgcacaatctcgcccaccagccgccgctgcacgccgtccggcttcacggccaggaaggtgcgttcgtgtgcgccggtgcaggctgcggggcaggcggggacgggccgtcaggccggcccagcaccggccacccgcccccggcccgcgccgcgcggctcacccgcggggaagaggttagcgaagatggtcagcaccaggcagatcatgatggcggtgcgggagcgggatccgcggggcggggcggtggcgcccggggcggggcctgcgcttaaagaggcctggtcggggcgctgcggcctccgcggggaggctgcttcacttgcaccccggaacccggcagccgtggggggccggagggcagctgcggaggccaagtctcctccagcagctcggacactaactgtatcccccacaacccgcccaggtggttccacccacgcggcgccctgctccgcaccgcccgaaccccgccccccccgcgcccccccggccagggccacgaccacagcgtcagcccttctctccccggtcctaaagacagagcgcaaagacaccacgaccctgggtacttcttttctctttattccctttcatagcttctgccgggatccaggcagagagagcactaatgggggaaagggagcgagcgcttcccgctttccccagcgtgggccctcggagttgggtgtgggggcagcagggccagaggaaaggcacaggtggcgatttgccccagccctcccccctaagatgcagaccctcagaacacgtcgcggaaggtgagctccctgctccgagaggcagactcgggtgtaacgcaaagacggtttctttcatcaataaggtccccactgcctcacagcccctaaggccacccgctggttctggcattctagacgggggtgcccttggcccttcctttgtcttcctgttttgcagggtaatcccagggttccatgcgtatcctctgcacattcagcatgggctcctcggtgcttgtgtctccatttttctgtcgttctgcgataatcatggcccggaggagaggcgggtacggcacggaggccaggctgtcttccggcgccggcgtgaacgcggtgaaggcctcctcctcgtgcttgggcaccagccgccagtcatggtacatgacgtgttcgatctcccgcgcctcgctctcagtcttccctgatgaagaaaaagaggcgtctgcacacacttgctgtgccgtcggcggtcggcatcgaactgccgggcacccgctctcccgagccttacctttgaaggtcaggatgccccaggccttcccgtggtccaagttctgcaaagccagaaggaagcggggtcagctcgcaaagctctcggcccccgaggtcaggaggtgggagcctcagccacgcaaacctgcagggaggaggggaggcggggagaccaggcggctgcaggggcggggtgcggacggggtgcacgcacctacctgcgccgtgtagtcgggccgcacccgcgtgaggcgccagtagcacggctcgtcgtgctgccacagccaggacttgcgcgtgaccaggcggcccaggccgaagagcgggaggcggccgagcagctgcaagaggcggctctcgcggcgcacgtcggcccaggcccggaccggcagccggcgtccagagaacggccgcgtcaaggtctcgtagtccaccgcgtagagctgggagtcgcgcggcctgttcagttgctcccgcagggcgcgcacgcggcgggccagctccgcgatcagccgcggacgcaccttcttccgcgccatggcgggtccgcgtcctcagcggtccggccggaagtcaccggaagaggccggtgtcccaggctaaagtgttcggtcgcggccggaagcgaggaagaggtcggtccggccatggcgcgggttggacccgggagggcgggggtctcttgccagggccggggccggggacggggcgggagcggtcagcggcgacctccaacctgggagatctcagactccgacgctgaggactccgccggctcggaggccgccgcgagagcccgggacccagcgggtgagcgcagggcggctgccgaggcgttgcggctgctgcggccggagcaggtgctgaagcgcctcgcggtgtgcgtggacacaggtgcggcggagggcacgggcgatactcggggtaggaaaggcctttctccgccaggcggcgccctctgtccgactgggcggggcgcgcgtgccgaggggcctggggccgggcccgcctcccagtcgggggtttgtgccgaatggagactccccggtccggccacccgcccaggtagggcgctcgcgagggtggaaggaagcagtgaccgcgctcctctcccccggtcccagccatcctggaagacgccggtgccgacgtcctgatggaggccctggaggccctgggctgcgagtgccgcatcgagccccagcgcccggcccgcagcctgcggtggacccgagcgagtcccgacccctgcccccgcagcgtgagtggtcgcgggttcccgagggccagccgcgagttggctgttttgcttccatgatttcagccctggagctgtccctgaggcagctgccctgggccgtgcgcgtctcgcggatgggtaaagcaaggatggagaacgggaagtggaggtgcccaagccgttctgctggtatagagccgagctggctggagaaggttccgtctcgattcaggctgtggtctggattcctgccggccacagagacctggcctgagcttggccttggcaggaaagggaacactgggcttctgtagagcaggcctgtcagggcctgggcttggctggggccacgaaccgctttgctgctggactgcccaggcagggcccctggggcacccggggttgagacaggcagcagcgcgtccccatgtccccacagctgcctcctgaagtgtgggctgcaggtgaacaggaattgctgctgctgctggagcccgaggagtttctgcagggcgtcgccacactgacccaggtgctcgggtggtggcagtagtccctctctaatcaggaggggtgggttcccagccgggaggcgcctgctccgccggtccctgcccctgtagacggggctggagggggcatggggcaggccaggactcctctctgatccaaagccgtagaggtttctagggtgagatggagaaagctcctgggcacctgcggaggctacagctgctcctagaggatcctgagaagtgtcaggaggccggggtccgggcagtaggctgcaggcttcgtcctctgacagcagacagcctggcccctgcctgcggggagcagtgctcaggtgctgtggtgccaggtagcgtggggttaggctagaccccctgccaggtccctgtgtcccaggatcagtgtctctcaagctgctgctttgtgctaggtcaaagctaggctggagtacagaggtggaccaggatgaggggctcaatggaactgacatgtgcccgagcagccactccagggtctccttagcctctttggcctcgtgggaggcacagagctggttttctcagaaggggtaacggaacagaggctcctctcggcaccactggctctttttcaggcttgctgttctgcaaaccagctgtggcctggtggcccatggccataggccgcagcctcctgtgaacaactgtgccacacgttctcatcttcagatctctggcccaacccactgggtgccctggatctcccccgagaccaccgcccggccccacctggctgtcatcgggctggatgcctacctgtggtaccgctcactctcatgcccacagcagggctggctgggacgggggttcaggggaggtgggcacacttctggggttgctgtggcacagctgatcccacttctccaggtgggctctggcagaggccaagctcgggcagggcaggccccatggggagcggggaggaatggtcacctctgctcaggtctcgccagcacgtttcccgggggacacagcagccagagagcccgaaggtggccggtgccgaggtggccgtcagctggccggaggtggaagaggtgagggcctgtctgagctgggtgagtcaggtggcctgggtcccagtgattgggctgctggctgggtttggttcccagcgtggtacatggggcagctatcagctgtgtgtcccgggtagccttcctctggctcgtgcccatcagcttgcctcctccccaggccctggtactcctgcagctctgggcaaacctggacgtgctactggtggcctcttggcaggagctgagtcggcacgtgtgcgccgttaccaaggctctcgcccagtatcccctcaagtgcgtgatgccaaggctgaaggggggcaggatcacctcaaggtagtggtgcctccccggccttttgggagctgctcacatgcggttctaaaaggcttctctctgtccccaggcagtaccgggaatcccaggccttctccttctgcacagcagggcgctgggcagccggcgagccagtggcaagagacggcgcagggctgcaggcggcctggcggaggcagatcaggcagttcagtcgggtcagcccagccgtggctgatgcagttgtcacagccttcccctccccccgccttctgcagcaggtgggcccctgcctcctccaagccctccaggtgcagaagccccgtccccaggcgccctctcatgcctttgcctgctcctaggcgctggaggcctgcagcacggagcgggagcgcatgggcctcctggccgaccttcctgtgccgcccagtgaaggcgggcgtccccgcagggtggggcctgacctctcccgccgcatctgcctcttcctgaccacagccaaccctgatctcctgctggacctgggctcctgaccacacgtgggaccaccaggacagcatgcagccttggggacagaccagacaccctgggcggttggggaggacccccagccacatgtggaccctcagcctgggtgggttctctggctgagcaggtctgacctcagggggagggtgggtggttgcaggggaagttttaggtagctgggagaagaggggcttctggctggcagatggctggcggttcctgtgctgagtcctgaacacgtaggccccaggggagctcagcagcagggctgtgcccccccaacacacacacacactcggcagggaccagaaggcagctccagggccccactgccacctggaggcttggggtgtggcaccctcagccagaagcagtaggggactcccaaggatgtggaggggcagtgaggcctgggagaaggcccaggctgctcgcaagcccggcctctgcacggatacgtttcagctcacgccatgtgggtgttagacatcaactctacatttattgcagtcctttaagtctatgacggcggggcagccgctgacagcatgcagagcaagttaggaaaaaccgaggccctgtgggaacagcaacgcgggctccagccaggctctcgtcctcgcagcctcccacaagacctggggctcagggcagccgcttccccacccagcacagcagcagaggggccctagagcccccacagaaaggactgtcccagcctcgggagcaagagatggctccctccggacgggcctcatccaactccgccctggagtgtggctggaaggaagggacagagaaagaagggacagaggaaaggggctgtcccagcccaagaaggcagttccactgggaagtcagtcaggtccggcggcagcgcttcctctggcagggccgaggctcgcgactgctggggtgggcggaggtcgctgcctggggatcggacactggagccttgcggcggctgcaactcatgctcaggacccagcccagcttgttgtgtagcacctgcttgaggcccggcggcagcggcagaccctccagcgtgtctcccgagtctggccgcagctggcgcaggcggtggcagcacaggtactggagggaagtggcgctggcacaggagcgggtgaccttcatgctgctccgggccgccgtggagcacaccatcgggtagaatctcttgttctgcagcttggtggctgccacacctggaagggaggggcccagcctgaaccccaggcagggaaggggccagctactgggcgcagcccctcagacctcacgctacagtcacccgggtgggcagctggcacagctgaggcaaggcagggtgcacgcgctggccctgccactccagcctggcctcactgtcccaccccctgggaccctggggcctcaggcttctgggaggaaccctttcagaaaacctcagtgtcccctgggctggggcggggtggctgcctccctcggggtgacagctgagaggagctcaagtcctgtgacggcctcacctatacacttcctgttcttgaaaaaggtgagtgtgccgtgccaggtgtccaggtgcacgccaatgatggagccctggccgaaccgcgacgagaagctggtcttgtcgcccttgtggtggaggaggcctgggggcagccagggtcgcagtgagcccgggagctccaggctcggccccgccccaccctgggcctcacgcacccgtgtaggagaggccccagctgtcctcatccctgcccagcaggctgcagaacgtgtggcggtatttgtccaggtccacatccgacgtcccgatgcccaccatctaggaacaggggccaggcagagggcgcggggctgggctgccggagccaggttccccagaagcaccctgggccgaagcaacttaccatgtcggtgccgtagacgggagaggtcatcttgatctcccagaagtgctggccctcccccagctccttggtgccccggatggccgctgtgccgcagctgtactccatgtggaagctgaccttacggttgtcacagctcagcagggtggctgatgacttatttaagtcatcccagacccagtcgaaatctgcaagagaggcccaggctggggcagccctgagagctccatggggctctgccctgcccacccccaggcccgcccgcagtgcagtcccagcaggggctgggccccacgctcacactcgtcttcctctccgcagcggcagtccctgccccggtgggccgagtgcaggctgctacagaaggaggcctcgctctgcccagcacagtcacagaaggactcgccggtcacgggcaccgcactggggatggatggcggcagcgtggagtactcggggtcggagtccgagtcgctgtgctgggagagaagggccggctgttactacctgttgcccgctctctaccctctcacccttgccctctgtccctgtcccaccctgtccctgacccacccaggaaaggatgggggtccaggcctccagggacttcacagtaccccgagcgcacagcccaggctccctcccaacgggctccggctctgccccattctgcatgaccaggagggccctggaggcccagccacagagcagtagccaaggctgcctggcctccaagtggtttctagacggtggataagccccaggtccaccccacctgcccagagctgagatggtgtggacaccttccctgctaggccagccctgcaggggcccccaggcaaggccaccacccccacaccaggcccagctgcagccacccggcctcagggcagtccccaccacactgtggcccaacgaccttcctgttacctgagcagacctggctcaccacagggtcctactgcccagtgcccactacaggccccgcccctcctggtgcaggtttcagctgtcacctccctgaggcttctccagccccttcacccctgttccatttttcttcttttgcttcactgaagttctccttggtcctgattcttggcctcctcccaccagaacgtgagctccttgtgggaggcagtgcccctcccagcctcctccctgtcacagactgtgtgggggccacccaggggctgaatggaccagggggtcagcagggagagtgctaagtggtggcggggggcctgtggcagaggccttgtgacagtgagggttgagggctggtccagagagatgatgtgatccccaggagaagccacaggggaccatgacatgggcgccaccagcttccaggtgaacgtggacctatcgaaagccagcttcagggcaggacactgtcctttctggaggggatggccccaccccacagacaaggcaggcccagacaactctaccccactgcctagaagtgcgggtccccagagccagggtagaccccctgagtcaggagcccgggcacagaactgagcacctgcactgcaggcccagggccgggttccctggagaaggagaaagactgaagccactgcctacctcctgcccacaacagactgcaggcccatttggtgacacaggacaagcagcacatgtgtcgaacactgccgagcccgcaggcacgcctgcatcccacagccacgagcctgtgaggctcaggcatgtgacctgcaggagctggaggcgggcgggaaggcaggtgggggcctctccctggctggagcagggagctccaggagacctcaggacggcccccacccggtgggtaaggaccctgtttcccaatttgcccccaaggcctaatggacccaccgggcttagggagtcctcactcagaggagaggagcccacccctcccaggacacctggctgagccggaacagcagcgcaggggagctgtgacagcagagagcagcaccaggtcacacaagcagccgccccggaaggacacggcccatggtgacagaggacaagcagcatgcgtgtgtcagacactggcctggcctgtggacacgcccgcgtcccacagccatgaccctgcgaggccaggagagactgctccagggcacatgacctgtggtagctggaagtggggcagggaggcgcagccacactcctgctctggtccgagggagatctcaggaaaccgactgggaaatcaccccccacagggacccccacccctcccagcctcactgcgccccgtcaggccaggcagctgccctcagggtctgccaaggtgggggtcaagggccatgggggcaggtagctctgcctgcaaagcccacaagcatgtcagatcacctgggctgcagacagacaaacacctgagctgttctgaataccttcaggttcctggcctcgctgagcaagtgcagaaatttttaccttcaaggatcagggtttttctgtttgtttgttttttaacacacacatatgtgaacaaagagtatgcgtttgtactggcagaagaagcgtctggtaagacaaccagcaagttaacaatggtcacctccagaaatgggctgggtaaaccaaagaatttttttgtttttgttttttttgagtcagggtctagctctgtcacccaggctggaacgcactggtgtgatcacggctcactgcagccttgacctccctggctcaagcaatcctcccagctcagcctcctgagtcgttgggactacaggcacgtgccaccacgcctgacacattttttaaatttttgtagagacagtgtttcaccatgttgcccaggcaggtctcaaactcctgggctcaagtggtcctccagcttcagcctcccaaagtgctaggattataggtgtgagccacagtgcccagccccgtagtggagaatttctgttgaatgaaccaaaagcaactgccaacctctccatgcaccatgtgtttcagaggagaaagcacagtgaagaatgcagtgtgttctgaggtcctgtcacccctgaggctgtgtgtgtcctttgccaaattaaagagtcttactgaatgcggtgcatccaggagacaggcccaggtttggactggtcctctagcctcagaagcatctttttctccgactgattccgtgttcaggtaatgtctgcctgcctgcctagggcatctccacaccttaggccagccacgtccgcctcgcccgctggaacctacctgcccatcagagtcgtagccccagttagtggagcctgctagagccacggcccgggcatctgcgtctcggcgggctgcactcaggacgaagtgccaggccctgctgttccgggggcgtctggccatggtggaaagaatctagaagaaaacacaggctctgggcaaaggaagactcacagcactcccagccctgagcttccaggctgggccacggacccactcaaagtggggactgcaggggccgcaccggtgcccagccagggctccagaacgcttcaggagcccgtacctcaccccaggatctgagcagctcaataaaacccaggtagatcctgtgaaacgccacccagacacccatgactccggaatgcgaatcccagcccctctctccggttccacctcacgaacctggctgccccgcccgcctgtcccgcaggcatctaaaacctccactcgctcctcctctgtcgtccggtttgacaaatggcatctccggcctcccagttcctcatgccagaagcaccgtgaccgctccccgacaccttcccctcacccccggcccgaccgccgcacccgcctgcatcctcctcccgccaccgtctcctgggccgcgcagctcgccttcccctccgctcgctaccgccagggctcctcgtgaaacacaaatcttaaaacctgctcagcgctggccgctgttatggtataaaatgcaaaaggctgcgagggccaggtctgcgcttcccaggccacctgcctggcacctccctcgccagctccggggttcccgcctagccttccagggccgacccctgcgccgggctcgcggctggcaacgcccgctgggccccgggtggggttccagggaggccggggcggatcgcggcgcccggaccgccgaaccctgcccagccccaggcgagcgcgtgtgcagcgggagccgccctccccggcggcagcccggcctggctgttccctcccgcgggcgcgcgggttccggagtcggcggcaccggggaagcctctctcgggcgcggccctccggagaggaacaaaggcggcgccctggccgcgctgctaccgccgcgcccgcaaggtcagcgcgcccgcccagagcccgagacgtcggcccgtgccccgccactcacctgcagcccccgctgcgcgctccgccggcccggccctgacccactttccgccccggagcgagacgtaaacaatccccgccccctgcgcccattggctccggcggcgaggggcgggcacacctgtctcggagcttcgggagagggggcgggagtcgggtgacaaagctattgccgagaggtttcaggaactgtcagtcctaatccaacgttcctattggtcagttcccaagcggttggagacaaagctcgcgcgcacattggacccgggtgggaggtggtaccgcaggccgcgttgaccggaaagtaggtccgtgtcatcgtctgcgccggaacctgcgggaccggatcgagagctcctccggcaagctgattggctgggacagcaggattaggcctgtcaagaagagccacgggcgggcacgcactgcccattggttggaaggcccttcgctctagctgggaggctgacggcccgcgggcgtaagcggactgcagccgcgagctcctggaggcggcgggatggaggcggcggccggtgagtggcgggccagggtgcggagccgctccagggcctcgcttggggccccgccgcgtcccttcccggggcggcctcgctgcgtcgcgcgcctccggtgcgaccatcaccggccggcgtggctgggccgggccagaggccgcggcgcgggcattttctaaacagggtcgtttcccgcgtgctcctgcttcgatgtggaagctccgtgatctcggagggcctgagtcgtggagttgggggagcttttaaagttaactttgttgagcaccgcgttgtaggcgggcgcggtggcgcctgtgggccccgctatcctggaggtcgcggttgcaactgcaccgcagcccgggcaagagcgagaccctgtctctaaataaatcacacgcgcgcagtcatgaaagtaagacggacgccagaatctcacatgcttttaagttctttgtggaagtggcgctctcagtgttcagaaaagtgtaagttgcgcgggacagaattcacaccagtggggacgatccgttcgccagatcagcgccgtgggccctcctgagtagtgggagccgcatttatcttctaagagacctcgagtccgataccaaaaggaaaacattcctcggacagcaaggtcttgcagcacaactctgacagattagaaaccgagtgctggagtcttttgtttttgagacggagtctcgttctgtcgcccaggctggagtgcagtggcgcggtctcggctcactgccagctccgcctcccgggttcacgccattctcctgccgcagcctcccgagtagctgggactacaggcgcccgccaccacgcccggctaattttttgtatttttagtagagacggggtttcaccgtgttagccaggatggtctcgatctcctgacctcgtgatccgcccgtctcagcctcccaaagtgctgggattacaggcgtgagccacggcgcctggcccagtgctggagtcttattccagaggagaagcctggaaaagcctgtccttattatcaggacggatttactacaaagtaaggatattactgagattgatagaagcttttttttttttttgagacagggtcttaactgtcgccaaggctgaagtgcagtggcacgatcataactcactgcagccttgacctcctgggctcaagcgaccctcccacctcagcctcctgagcacctgggaccacaggatgcaccaccccgcttggctacatttttaatgtgtagacatggggtctgaatacgttattgagagtggtgcggaactcctcctggaccgaaatgatccttccactttggcctctcagagtgctgggattactggcgtgagtcactgcacctagtccaagctttcgtttttttgttggggggagacggagactcgctccgttgcccaggctggagtgcagtggcacaatctcgatgacggctcactgcaatctccacctcccaagttcaagcagttctcctgcctcagcctcccaaatagctgggataacaggcacacgccaccacgcctggctaattttttttgtatttttagtagagacagggtttcgccatgttggccaggctggtctcgaactcctgacctcaggtgatccacccacctcggcctcccaaagtgctgggattacaggcgtgagacaccgcgcccggccccaagctttctttaaacagggaaaatatgcacataaaaattcaaaaggcctaggctgggcaagttggctcatgcctgtaatcccagcactttgggaggccgaggcgggcagatcacttgaggtcagatttgagaccagcatggccaacatagagaaacagtctctacgaaaaaaaaaaaaaattagctgggcatggtggcgcacgcctgtggtcccaggtactctggaagctgaggcgtgggaggctgaggcacgagaattgcttggacccaggaggcggaggttgcagtgagccgagattgcgccactgtactccagcctgggcgacagaatgagaccccctctcaaaataaaaatatacatttactgtaaaaatatatttgtccaccacgtggaatgatctggatttgctaacccataaagctgaccgggactcattgtccatggagagcgcactcgccttcctcggggagatggtgcttcgcctccttcctgcacttccagccccactgccccacccggcatgctcatgctgactgtgctttgctgacaatctgcttaggagctgcctcagtttgctgagaagtgaaatgttcttgggggaaccctcagggttgttgtcccggttcctgacactaaggcctgcatttaccatggtgctcagcccaacacaccagacaggcaccgttcccccacctctgccaacgaggagagcccctgggggttaacactgccgctggtgccagcactgatggcagcatggcagtcaggacccaggcctgacagagtccccggcagctacagaagtgcatgctccctctctgcacgggccacttctggtacctcttggtgttgaagtaatttaagtcagaaccccttttattgccccaggggtgaccgggaggccgtggtctcggggctttgtgtttgcaggagtgtggggctggggctgccttttccgcgtcccctggaggagacctcaggcagcctctgtaggtctgaggacccgcctgcatgccaggttctccgggaggctttggacttgggagcctttgaacgtgcccttgagaggcggatcagaagggggcaggttttacgcatcatgtgttgagcccctcacatgcaccctccaaggacctgtcggggatggagcagcttgctggagacaaggggcatggcctcagcggtggcgccggggtgagaatgcaggggttttgccaaggtatctgcacacagcagcccctgccgtgtggcagggacaggatgggaccctggaaggaagaggagctggagctgtgctggaagcagccggctcccctcacttaccgcacattgcagggaccgagagccggggacgctggtgtgtgacaacgcgtggttgttgccacccaccctgggccctctgctgcctctgccgagcccaggtgcactggctggggaaagagtggagtctgtttggttcccgttagaaatagcagggggctggcagtttcatgatcatgtgacccacgtgtgtgtttgcacacgcgcacgaaggaacgcatgcacccttgcacacagcgagaggagttgggcagtttccactctcagcagcgccgcctcaggcaggtgcagggagtgccgtggtcttagagggtccccccgggtctggggctgcaggggacctgcctggaggtctttacatcggggcgaagtggggcacgggctgcctctgggtctggcgattcaccactgccccgctcagaacgtgggtgcaagaggcagtgggtgaccccgcgtgtgtgggcacagtgggcaccaggagc

SEQ ID NO: 1278 - DNA, 1420 bp, Homo sapiens
ggcacgaggaagatggctgtggagctgggcgtgctgctcgtccggccccggcccggaaccgggctgggtagagtgatgcggaccctcctgctggtgctgtggctggcgacgcgcggaagcgcgctctactttcacatcggagagacggagaagaagtgctttattgaggagatcccggacgagaccatggtcataggaaactaccggacgcagctgtatgacaagcagcgggaggagtaccagccggccaccccggggcttggcatgtttgtggaggtgaaggacccagaggacaaggtcatcctggcccggcagtatggctccgagggcaggttcactttcacttcccatacccctggtgagcaccagatctgtcttcactccaattccaccaagttctccctctttgctggaggcatgctgagagttcacctggacatccaggtaggtgaacatgccaatgactatgcagaaattgctgctaaagacaagttgagtgagttgcagctacgagtgcgacagctggtggaacaagtggagcagatccagaaagagcagaactaccagcggtggcgagaggagcgcttccggcagaccagtgagagcaccaaccagcgggtgctgtggtggtccattctgcagaccctcatcctcgtggccatcggtgtctggcagatgcggcacctcaagagcttctttgaagccaagaagcttgtgtagctgtcccaggtgtcacaacccatcctcccaggctgggggagaaaggacctcctggaactgacttcttctgtcaggaggactggtttccagccatacctgttctggaagggagaggggctggaggcacccacaggcacaagctgaaggcagcagcttggctaatactgagcaggtagtggggcaaattcctgccctctctctctggcctctgggccgtttggtagtaatcacccaggggctggtaaagcccctcctcttggcacctcagaatcacagtgttactgatcagggatgtgaggctgctgttgggggtggggggaggggaatgggcaggcaagccagtcttctgtcttcctttgctaacttagggttttgagcaggttggggtatggtgcctgtcatacccacctgccaccctgggaacctcactgttctctctttcagcctagacctgctgatccagggtgtgtgtgagttgagggtgggtggaggggtttgcagtgtgggaatgtggccctgcagttgacctgagctgcttcacatggttgtccattctggggcttaaagaactgggaccagaccaagtagaggccttggtgctggttggggtggggcctgcagagtcttagttactgatttcattttcaataaatgtaggtttgttacatgagtttcccaataaaaaaaaaaaaaaaaaaaa

SEQ ID NO: 1279 - DNA, 639 bp, Homo sapiens
atggatcccctgttccagcaaacgcacaagcaggtccacgagatccagtcttgcatgggacgcctggagacggcagacaagcagtctgtgcacatagtagaaaacgaaatccaagcaagcatagaccagatattcagccgtctagaacgtctggagattttgtccagcaaggagccccctaacaaaaggcaaaatgccagacttcgggttgaccagttaaagtatgatgtccagcacctgcagactgcgctcagaaacttccagcatcggcgccatgcaagggagcagcaggagagacagcgagaagagcttctgtgtcgaacgttcaccactaacggctctgacaccaccataccaatggacgaatcactgcagtttaactcctccctccagaaagttcacaacggcatggatgacctcattttagatgggcacaatattttagatggactgaggacccagagactgaccttgaaggggactcagaagaagatccctgacattgccaacatgctgggcttgtccaacacagtgatgcggctcatcgagaagcgggctttccaggacaagtactttatgataggtgggatgctgctgacctgtgtggtcatgttcctcgtggtgcagtacctgacatga

SEQ ID NO: 1280 - DNA, 1696 bp, Homo sapiens
cccgggcaggttagaagacagcaggggaactcgagaagttggttgttttcagcagattaaaacaatacagatttatcagcaagactgttcaacgcataactgcccaagatgcctgtccctccccctccagcacccccgccgcccccgacgtttgcactggccaatacagagaagcctaccttgaataagacagagcaggctgggagaaatgctctcctttctgatatcagcaaagggaagaaactaaagaagacggtcaccaatgacagaagtgcaccaatactggacaaacctaaaggagctggtgctggaggcggtggtggtggctttggtggaggcggcggatttggcggaggaggtggtggcggaggcggtggaagttttggagggggcggacctccaggtctgggaggattgttccaggctggaatgccgaagctgagatccacggccaacagggataatgattctggaggaagccgaccaccattgttgccaccgggaggaagatccacatctgcgaaacccttttcacccccaagtggcccagggaggtttcctgtgccttctccaggccacagaagtggtcccccagagcctcagaggaaccgaatgccgcccccaaggcccgacgtgggctcaaagcctgatagcattcctcctccagtacctagtactccaagacccattcaatcaagtctgcacaaccgggggtccccaccagtgcccggaggccccaggcagcccagccccgggcccactcctccccctttccctggaaaccgcggcactgctttgggaggaggctcaatacgtcagtcccccttgagctcctcctcgcccttctccaaccggcctcccctgccgcctacccccagcagggccttggatgacaaaccccctccaccacctcctccagtgggcaacaggccctccatccacagggaagcggttccccctcctcctcctcagaacaacaagcctccagtgccttccactccgcggccttcggctcctcacaggccccacctccgcccgccacctcccagcaggcccgggccgcctcctctgcctccaagttccagcggcaatgacgaaaccccaagactcccacagcggaatctgtccctcagttcgtccacgcccccgttaccttcgccaggacgttcaggtcctcttcctcccccgcccagtgagagacccccacctccagtgagggacccgccaggccgatcaggccccctcccaccacctcctccagtaagcagaaacggcagcacatctcgggccctgcctgctacccctcagttgccatccaggagtggagtagacagtcccaggagtggacccaggcctccccttcctcctgataggcccagtgctggggcacctcccccacctccaccatcaacatctattagaaatggcttccaagactctccatgtgaagatgagtgggaaagcagattctacttccatccgatttccgatttgccacctccagagccatatgtacaaacgaccaaaagttatcccagcaaactggcaagaaacgaaagccggagtggatccaaccgaagagaaaggggtggtccaccactccctcccatcccgaggtgatctttggctgctcttctctacccaagctcaagagctgcttctgttggtatctaagaactggataccctcccccctg

SEQ ID NO: 1281 - DNA, 2194 bp, Homo sapiens
ctctaaagcttagagccaagatggcgggatccaggcaaaggggtctccgggccagagttcggccgctgttctgcgccttgctgctgtcactcggtcgcttcgtccggggcgacggcgtgggaggagaccccgcggtcgcgttgccacatcgccgtttcgagtacaaatacagcttcaaggggccgcacctggtgcagagcgacgggaccgtgcccttctgggcccacgcggggaatgctattccaagttcagatcaaattcgagtagcaccatctttaaaaagccaaagaggctcagtgtggacaaagacaaaagcggcctttgagaactgggaagttgaggtgacatttcgagtgactggaagaggtcgaattggagctgatggcctagcaatttggtatgcagaaaatcaaggcttggagggccctgtgtttggatcagctgatctgtggaatggtgttggaatattttttgattcttttgacaatgatggaaagaaaaataatcctgctatagtaattataggcaacaatggacaaatccattatgaccatcaaaatgacggggctagtcaagctttggcaagttgccagagggacttccgcaacaaaccctatcctgtccgagcaaagattacctattaccagaacacactgacagtaatgatcaataatggctttacaccagataaaaatgattatgaattttgtgccaaagtggaaaatatgattatccctgcacaagggcattttggaatatctgctgcaactggaggtcttgcagatgaccatgatgtcctttcttttctgactttccagttgactgaacctggaaaagagccgcccacaccagataaagaaatttcggaaaaggaaaaagaaaagtatcaggaggaatttgagcactttcaacaagaattggataaaaaaaaagaggaattccagaagggccaccccgacctccaagggcagcctgcggaggaaatatttgagagtgtaggagatcgagagctaagacaagtctttgaaggacagaatcgtattcatcttgaaatcaagcagctgaaccggcagttagatatgattcttgatgaacagagaagatatgtctcttccttaacagaggaaatctctaaaagaggagcaggaatgcctgggcagcatgggcagattactcaacaagaactggatactgttgtgaaaactcagcatgagattctgagacaagtaaatgaaatgaaaaattccatgagtgaaaccgtcagactggtcagtggaatgcagcaccctggctctgctggaggcgtctatgagacaacacagcacttcattgacatcaaagagcacctgcacatagtaaagagggacatagataacttagtgcagcgaaatatgccatcaaatgaaaagccgaaatgcccagaactaccaccatttccatcatgtttgtctacggtccacttcattatatttgttgtggtgcaaactgtattattcattggttatatcatgtataggtctcagcaagaagcagctgccaaaaaattcttttgactaccattttcctgtgtacttcatctatttgtgtacaaaatgatgtcgttttgagggaatttaagtatttaaattgcttcatagtctaaattattaattttcttaataaaataactgtttaaacattgatttgcagttaagaataaaccttaaagcaaagacaaccacattttaatttgttcacagtatgtaaatctgtctaaatttcagtgaatttctggtcagtatgatgcagcctctgagcagatattgaccagtaagagggtaaataaagtgggggcaacccctggatatgaatgttaccccctaagtctccaatattgcaggtttccctgtataacgtaaacacacttgccctcatgcctcccagaatatgaggtctaattaagaagtcccatcaggtttattttgtaaccaaagtcttttttagaggtcagacttcctaatcaaaggcctgggcctgcagtcctttcatcttaatgcaacttcctttgaaatcaaagaatattttgtctgagagctttaaggatctggtaatagacttcaaaatgttaagtgaaattttttttcctctatttatcaatgatatatttcacttttaaaggaaattttggaggaaaatatagctgctttttgcctaa

SEQ ID NO: 1282 - DNA, 2194 bp, Homo sapiens; identical to SEQ ID NO: 1281

SEQ ID NO: 1283 - DNA, 2818 bp, Homo sapiens
caacggggccgcacccgagctacccgtgcccaccggtgggccggcggtgggagctcgggagcaggcgctggcagtcagtcggaactacctctcccagcctcgcctcacatacaagacagtatctggagtcaatggtccactagtgatcttagatcatgttaagtttcccaggtatgctgaaattgtccatttgaccttaccggatggcacaaagagaagtgggcaagttctggaagttagtggttccaaggcagtagttcaggtatttgaagggacttcaggtatagatgctaagaaaacgtcctgtgagtttactggggatattctccgaacaccggtgtctgaggatatgcttggtcgggtattcaatggatcgggaaaacccattgacagaggtcctgttgtactggccgaagacttccttgatatcatgggtcagccaatcaaccctcaatgtcgaatctacccagaggaaatgattcagactggcatttcggccatcgatgggatgaacagtattgctagggggcagaaaattcctatcttctctgctgctgggctaccacacaatgagattgcagctcagatctgtcgccaggctggtttggtaaagaaatccaaagatgtagtagactacagtgaggaaaattttgcaattgtatttgctgctatgggtgtaaacatggaaactgcccggttcttcaaatctgactttgaagaaaatggctcaatggacaatgtctgcctctttttgaacttggctaatgacccaaccattgagcgaattatcactcctcgcctggctctaaccacagctgaatttctggcgtaccaatgtgagaaacatgtattggttattctaacagacatgagttcttatgctgaagcacttcgagaggtttcagcagccagggaagaggtacctggtcgacgaggttttccaggttacatgtatacagatttagccacgatatatgaacgcgctgggcgagtggaagggagaaacggctcgattactcaaatccctattctaaccatgcctaatgatgatatcactcaccccatcccagacttgactggctacattacagaggggcagatctatgtggacagacagctgcacaacagacagatttatccacctatcaatgtgctgccctcactatcacggttaatgaagtctgctattggagaagggatgaccaggaaggatcatgccgatgtatctaaccagctatatgcgtgctatgctattggaaaggatgtgcaagccatgaaagctgtcgttggagaagaagcccttacctcagatgatcttctctacttggaatttctgcagaagtttgagaggaacttcattgctcagggtccttacgaaaatcgcactgtctttgagactttggacattggctggcagctactccgaatcttccccaaagaaatgctgaagagaatccctcagagcaccctcagcgaattttaccctcgagactctgcaaagcattagctgctgcttctgcattgctccgcgctcttgtgaaatactggttctgttttctttattccttttgcactctcggttcccacctttgtgttggagtttaccatgttaccctgtaattaaaaacaaagaataggtaacatattgtgccagtgttgcaacgttttaaactgctaacagaccttaaaatatccccctacctgggtcctcagtgctatgtttaaagtgctgcagggatggagtggcgttttcttattgctgtatgtattgtacatagtggagtagttagttacctgataacagtcttgttatttgggtctcttagaccttacctctcaactccctcaagagtaccagtctctgaagttataatgctttggtctctacattaggggcaagatccagtctgagagaagtctcctttgagaagggccaagaggctctttcctgagtgtttgctttcggtttgttggtatgcctgtattgctgggctgtgctgctgctcgaagcagatggttttgactgtctttttgctctttcctatataatgaatagatgagtgaaagtagttttctttttctctttagtacttacgtattgggattcctgtgtcttacagctctccctctccaaataatacacagaatcctgcaactttttgcacagctggtatctgtctggtagcagtgagaccccttgtcttggtgatccttactgggtttccaagcagaggagtcacatgattacaattgccagtagagttgttgtttggggtacaagatgagaagaaagaaaaacctacagcctttctacattctgacatgctaacagtggtttaagtttctaaagtgtttaccagatgctgaaggcaaggggagggagcagaagcacttatgtttacggatattttaaactctgttagagagcagcctttgaaaatccccaatttggttctgctttttgacctctctctaccttttcagggtaatctttgtggcacaaacgatagcatttccaagctttagagttttctgaattcctgcgccttcctgacgtgagccctgagcgatcttctatgcagttctgccatgcgtcctgttggtctctctgtgttctttgttacttgggtgcaatagcaacttccctaccccgtgcattccatctttcatgttgtgtaaagttcttcacttttttctctgagggctgggggttgggggagtcagcatgattatattttaatgtagaaaatgtgacatctggatataaaatgaaaataaatgttaaattaaatggaccttaaaaaaaaaaaaaaaaaaa

SEQ ID NO: 1284 - DNA, 1792 bp, Homo sapiens
cttgaggggaagaggctgactgtacgttccttctactctggcaccactctccaggctgccatggggcccagcacccctctcctcatcttgttccttttgtcatggtcgggacccctccaaggacagcagcaccaccttgtggagtacatggaacgccgactagctgctttagaggaacggctggcccagtgccaggaccagagtagtcggcatgctgctgagctgcgggacttcaagaacaagatgctgccactgctggaggtggcagagaaggagcgggaggcactcagaactgaggccgacaccatctccgggagagtggatcgtctggagcgggaggtagactatctggagacccagaacccagctctgccctgtgtagagtttgatgagaaggtgactggaggccctgggaccaaaggcaagggaagaaggaatgagaagtacgatatggtgacagactgtggctacacaatctctcaagtgagatcaatgaagattctgaagcgatttggtggcccagctggtctatggaccaaggatccactggggcaaacagagaagatctacgtgttagatgggacacagaatgacacagcctttgtcttcccaaggctgcgtgacttcacccttgccatggctgcccggaaagcttcccgagtccgggtgcccttcccctgggtaggcacagggcagctggtatatggtggctttctttattttgctcggaggcctcctggaagacctggtggaggtggtgagatggagaacactttgcagctaatcaaattccacctggcaaaccgaacagtggtggacagctcagtattcccagcagaggggctgatccccccctacggcttgacagcagacacctacatcgacctggcagctgatgaggaaggtctttgggctgtctatgccacccgggaggatgacaggcacttgtgtctggccaagttagatccacagacactggacacagagcagcagtgggacacaccatgtcccagagagaatgctgaggctgcctttgtcatctgtgggaccctctatgtcgtctataacacccgtcctgccagtcgggcccgcatccagtgctcctttgatgccagcggcaccctgacccctgaacgggcagcactcccttattttccccgcagatatggtgcccatgccagcctccgctataacccccgagaacgccagctctatgcctgggatgatggctaccagattgtctataagctggagatgaggaagaaagaggaggaggtttgaggagctagccttgttttttgcatctttctcactcccatacatttatattatatccccactaaatttcttgttcctcattcttcaaatgtgggccagttgtggctcaaatcctctatatttttagccaatggcaatcaaattctttcagctcctttgtttcatacggaactccagatcctgagtaatccttttagagcccgaagagtcaaaaccctcaatgttccctcctgctctcctgccccatgtcaacaaatttcaggctaaggatgccccagacccagggctctaaccttgtatgcgggcaggcccagggagcaggcagcagtgttcttcccctcagagtgacttggggagggagaaataggaggagacgtccagctctgtcctctcttcctcactcctcccttcagtgtcctgaggaacaggactttctccacattgttttgtattgcaacattttgcattaaaaggaaaatccactgctaaaaaaaaaaaaaaaaaaaaaaaaaaa

SEQ ID NO: 1285 - DNA, 4012 bp, Homo sapiens
gacgagcgctgcactaacgcaggatccggctgccgaaggtcctcgccagcaggatgaagttaaaggaagtagatcgtacagccatgcaggcatggagccctgcccagaatcaccccatttacctagcaacaggaacatctgctcagcaattggatgcaacatttagtacgaatgcttcccttgagatatttgaattagacctctctgatccatccttggatatgaaatcttgtgccacattctcctcttctcacaggtaccacaagttgatttgggggccttataaaatggattccaaaggagatgtctctggagttctgattgcaggtggtgaaaatggaaatattattctctatgatccttctaaaattatagctggagacaaggaagttgtgattgcccagaatgacaagcatactggcccagtgagagccttggatgtgaacattttccagactaatctggtagcttctggtgctaatgaatctgaaatctacatatgggatctaaataattttgcaaccccaatgacaccaggagccaaaacacagccgccagaagatatcagctgcattgcatggaacagacaagttcagcatattttagcatcagccagtcccagtggccgggccactgtatgggatcttagagaaaatgagccaatcatcaaagtcagtgaccatagtaacagaatgcattgttctgggttggcatggcatcctgatgttgctactcagatggtccttgcctccgaggatgaccggttaccagtgatccagatgtgggatcttcgatttgcttcctctccacttcgtgtcctggaaaaccatgccagggggattttggcaattgcttggagcatggcagatcctgaattgttactgagctgtggaaaagatgctaagattctctgctccaatccaaacacaggagaggtgttatatgaacttcccaccaacacacagtggtgcttcgatattcagtggtgtccccgaaatcctgctgtcttatcagctgcttcgtttgatgggcgtatcagtgtttattctatcatgggaggaagcacagatggtttaagacagaaacaagttgacaagctttcatcatcttttgggaatcttgatccctttggcacaggacagccccttcctccgttacaaattccacagcagactgctcagcatagtatagtgctgcctctgaagaagccgcccaagtggattcgaaggcctgttggtgcttctttttcatttggaggcaaactggttacgtttgagaatgtcagaatgccttctcatcagggagctgagcagcagcagcagcagcaccatgtgttcattagtcaggttgtaacagaaaaggagttcctcagccgatcagaccaacttcagcaggctgtgcagtcacaaggatttatcaattattgccaaaaaaaaattgatgcttctcagactgaatttgagaaaaatgtgtggtcctttttgaaggtaaactttgaggatgattctcgtggaaaataccttgaacttctaggatacagaaaagaagatctaggaaagaagcacattaaagaggaaaaagaagaatctgaatttctaccctcatctggaggaacatttaatatctctgtcagtggggacattgatggtttaattactcaggctttgctgacgggcaattttgagagtgctgttgacctttgtttacatgataaccgcatggccgatgccattatattggccatagcaggtggacaagaactcttggctcgaacccagaaaaaatacttcgcaaaatcccaaagcaaaattaccaggctcatcactgcagtggtgatgaagaactggaaagagattgttgagtcttgtgatcttaaaaattggagagaggctttagctgcagtattgacttatgcaaagccggatgaattttcagccctttgtgatcttttgggaaccaggcttgaaaatgaaggagatagcctcctgcagactcaagcatgtctctgctatatttgtgcagggaatgtagagaaattagttgcatgttggactaaagctcaagatggaagccaccctttgtcacttcaggatctgattgagaaagttgtcatcctgcgaaaagctgtgcaactcactcaagccatggacactagtactgtaggagttctcttggctgcgaagatgagtcagtatgccaatttgttggcagctcagggcagtattgctgcagccttggcttttcttcctgacaacaccaaccagccaaatatcatgcagcttcgtgacagactttgtagagcacaaggagagcctgtagcaggacatgaatcacctaaaattccgtacgagaaacagcagctccccaagggcaggcctggaccagttgctggccaccaccagatgccaagagttcaaactcaacaatattatccccatggagaaaatcctccacctccgggtttcataatgcatggaaatgttaatccaaatgcttctggtcagcttcccacatctccaggtcatatgcacacccaggtaccaccttatccacagccacagccttatcaaccagcccagccgtatcccttcggaacaggggggtcagcaatgtatcgacctcagcagcctgttgctcctcctacttcaaacgcttaccctaacaccccttacatatcttctgcttcttcctatactgggcagtctcagctgtacgcagcacagcaccaggcctcttcacctacctccagccctgctacttctttccctcctcccccttcctctggagcatccttccagcatggcggaccaggagctccaccatcatcttcagcttatgcactgcctcctggaacaacaggtacactgcctgctgccagtgagctgcctgcgtcccaaagaacaggtcctcagaatggttggaatgaccctccagctttgaacagagtacccaaaaagaagaagatgcctgaaaacttcatgcctcctgttcccatcacatcaccaatcatgaacccgttgggtgacccccagtcacaaatgctgcagcaacagccttcagctccagtaccactgtcaagccagtcttcattcccacagccacatcttccaggtggccagcccttccatggcgtacagcaacctcttggtcaaacaggcatgccaccatctttttcaaagcccaatattgaaggtgccccaggggctcctattggaaataccttccagcatgtgcagtctttgccaacaaaaaaaattaccaagaaacctattccagatgagcacctcattctaaagaccacatttgaggatcttattcagcgctgcctttcttcagcaacagaccctcaaaccaagaggaagctagatgatgccagcaaacgtttggagtttctgtatgataaacttagggaacagacactttcaccaacaatcaccagtggtttacacaacattgcaaggagcattgaaactcgaaactactcagaaggattgaccatgcatacccacatagttagcaccagcaacttcagtgagacctctgctttcatgccagttctcaaagttgttctcacccaggccaataagctgggtgtctaaaaggacagcttctcttccactcaatattgccatttttccaaagaaacatgttaaaaaaaaaaattataagacatggactagtcctcattagcatgtttgcatagcaaccagtcaagagcatttacactatttctgctgatatactcaccttagaactgctcagaaccctggtgctttatttttgttttaatcttttgttgccagtgatgattttcctattctgcaaatagtgtatttcctggattacacatagtatggtttcctgaagtattctgataaatgtgtttttttaaaacctcaatatactttttagaaaaggagcatctggttatgcataaagcagagctaaaactaaatttctttcatgtcctccctacttcctcagtgtcaatcagattaaagtgtgtaatcct

SEQ ID NO: 1286 - DNA, 712 bp, Homo sapiens; identical to SEQ ID NO: 301
  misc_feature 205: n = A,T,C or G

SEQ ID NO: 1287 - DNA, 447 bp, Homo sapiens
caggatttggtctgagaaaggcgatttcatcagagaactggatagagcttacttactcaaagtaagacgcacatgacgtcacctgtcttaaggaatcactgtggcgtttgtggcttgtcctagactacaatgtgactgaatcatatggttgaagtagtgactaaattaaggcagaaaataatggtgatgtcatttctggtgtgcttttgaaaggggtctccttaacaattaaaacgcaaagaagagtaattaaaggtctagcaccaagaagccctttgagtcgctctcaaaggattacaatatgtttgcttttattaggctccaatatccaggccacaaattgagcaactttttgaaatgttgggtgatatttttctttaatcaagagcgtaatcccacatagagatcctagaggtctcttattgttgtgttcccattgagttggtt

SEQ ID NO: 1288 - DNA, 441 bp, Homo sapiens
ggaacccacccagacccgaaatgactgaggctactcagccagtcctagagaatttcagcaggacagcatctggaggtgcctttgtgatgtccaatgttccaattggtccattgcctgatcagtacccaccaaatcgaatcacagacctccaggccacactcgatggggaagagatcagtctaacatggacggccccaggagatgattatgatgttggaagagttcaacagtatatcataagaacaagcgaaaatatcattgatctcagagacaattttaataattctcttcgggttgatactactaaacttacaccaaaagaagccaactccaaagaaacctttgcctttaaaccagaaaatatctcagaagaaaatgcaacctacatattcattgccattgaaagtgtcgacaaaaacaatttgagttcgggaccatcca

SEQ ID NO: 1289 - DNA, 361 bp, Homo sapiens
aaactaagtagcagcattttgtttacagggcttggatattgtagatgacgtgggatccggtccctcatccctagcactagatctaggtcctagggagatgccgccattgtgctgttccctggtgtaccacagatcagtgaaagtgttttatcttttttacgtcgtttgtatggattggattttataatggtaagaaaacagagtgttgtattttgagctgaaatttgtgtatggtcaagtaattctgttttatgtattggaagtccgtttacaacttgaactattttctagaagagtgttggacaaaatgaattgtcttcaagctgtttcattaactaataaagtcatttgatggggaaga

SEQ ID NO: 1290 - DNA, 470 bp, Homo sapiens
aatcactactggatctagtatcttgctactgatgtctttcttttggtttatttatgccatagactgtggttgtttggcctatgcatgaatatataaatatttatgtatgtaaagcttttccaaatagctctctgaagagttgaatttttaacttcttattgtttttgcattgctttctgagctgaatttgagtaacagattaactataacataaagctatagattcttacatgctttgataatagcccagatatctatgttgtttttacattggtgtcagacaggcacaggacatttaacacaagagctaaaacaaaaactggatctggctgaatagaacagaaaacaatcctagtccacctgtatgtgtcgcaggcttggcaacagatcatgagtgaccacagttcccaccgcattctcatacaggccaattccctattgttttagtagggctgcctttggaaatggag

SEQ ID NO: 1291 - DNA, 470 bp, Homo sapiens; identical to SEQ ID NO: 1290

SEQ ID NO: 1292 - DNA, 318 bp, Homo sapiens
acggcaagcaagttttcctctggcttccgcatgcatacgcgcacatgcacctgtacatacgtgaccatgcacaccatcagagggtttttttctttgcggctcattcttgcccagcctaagtcaggcagaagcagcgtcaatgtgtgtgatgtagtggtccttttcccatgggtctctttctgaatttggagctacgtgaaatgaaagggtaggttggtttgtttctttgactaagtcagccggttggcttacatatggtgaaaacggggcggtctggggcagaagtgagtgcaagtgtgaaaatcgaaacattcagga

SEQ ID NO: 1293 - DNA, 343 bp, Homo sapiens
gtacgctttctaaagcttatctcaggtctactggtagtcatgctctctagggcccattgctcatttagtggtgtatactgaattatgaactcctagggcaaacacagttaggatctttcaagaccattcacatattttatcagcatattaataggtaactttgttttataaatgtttctgtttgaaggcaccatatgtaataatactgttacttcatcagttttaaatccataacaacactaactcatacctgatttaagctcagcgattgtgtcagggcgccttaaatcatatcatatccttcatgtggtcagcaatattagataccactttgccagtatat

SEQ ID NO: 1294 - DNA, 546 bp, Homo sapiens
gagagagagagaaataggtcagatcagtatgttgcaagcagatctttagagcctgtcaagttttggttagttgtagtttccatttggaaatgtagatgaatgcttgtagatattggagattgtttctatcttgtaagaacttttcactggtgctgtaagatttcaaatagcaccagtcttaacctttaaatgggaagtagaaaaggtgagcccaaagtttacagatgattttaatgctatacatgttagtgtagtgatacttagaatgctttgtttgatgtttatttcagaaatgcgtatactagaaaatcattttaatattaaaactggtgacttaaatccagtttgtaaagtgttttcttaaagaaggatcttggtacttaattgataaagtgggtttagataggagtagcaagtgctctcgatagagaaagtttttgttcacttcaatactttgtcattacaaccagttcttcctgaaaatagttacatgtctagtaaattgatgtagaattaactcgctggagataatctcattttagttct

SEQ ID NO: 1295 - DNA, 520 bp, Homo sapiens; identical to SEQ ID NO: 817

SEQ ID NO: 1296 - DNA, 520 bp, Homo sapiens; identical to SEQ ID NO: 817

SEQ ID NO: 1297 - DNA, 491 bp, Homo sapiens
ctttgcacggcattcctggctaacatctacaatgggaggtgtagagaaagacatggagatgacttgattgtgaccccgtttgctcagaatttcatgcctcatgaaagacactatggcctgacgtcagcagctagctatttggatacttcgtcacaggcggtgtgacctttcggagttgtgagtgataatgagccaggttttccagtgactggctggcttactcggaggttctatgaactccttcagggggactgctgaaggtcaccatggctgcagagcataaacagcttccttttgacttgcacaagttcccgtcagcttcgagaaaacaaacacccgagacacagagtgactttcgtctggaccactgtccgatgaagaaactcagggcacagttctcaaacccctaggtcaattagaaaacggaggattctgtatattgccactaataagcattcagcaaacttcctatgggccagataagtcaatgg

SEQ ID NO: 1298 - DNA, 132 bp, Homo sapiens; identical to SEQ ID NO: 818

SEQ ID NO: 1299 - DNA, 405 bp, Homo sapiens
atcagtgctacaaaataactttatttaaaaatgctcatatgtacaccaaattttaacacaatttattagcacaaaacaatgaacattattccaagtctgtaaccacaataaaccaggtacctcacaatgttctattttagcttaccagaaaaaaaaaaacaaaacattgaaacccttgttaacaatcttcccatactttaaaattcacagcacgcacttcctgaatagatcctagacaactagcaatgtattatatatcatttacacaaatagaaaggcacaccaattctgagtgcacagagcaaagcaatcttagacaagaatctggaataggctatacaaaataatctggaaaactccaaggagcaggcatgctactagaacggcccttgcccactgagctgt

SEQ ID NO: 1300 - DNA, 320 bp, Homo sapiens
gtcttgattttgtctttatatgcgagggaactactgggaactgggcctgactttgtagatcctccttttcttggcggggacgggcgtgcggtcccgctccccgtaatgtacggaggtagaagaaagggctctggcctctcggcgttatgtcttcggtgcttgcggcttcccgttcgcgggttctatcctcagacgccggaacacttaaccgtgcagaaatgtagctaggtcccgcagtcccctctgggttactcaacgctttttattttattttaggtcgacattgacgctcccggagtgatggttaacattttctttgc

SEQ ID NO: 1301 - DNA, 426 bp, Homo sapiens; identical to SEQ ID NO: 819

SEQ ID NO: 1302 - DNA, 193 bp, Homo sapiens
  misc_feature 54, 55, 67, 68, 86, 87, 113, 114, 115, 122, 123, 131, 133,145, 147, 148, 161: n = A,T,C or G
ccaatctgaagctcacacatagggtgcacaaggaagagagcatcagccatgctnnagaagacattanngtagtcgccagtgcggcnntcctgttccgtgctttagctcctgtnnnttgttanncagttgangnagctgagactcntnngttaaccgattanagtgaaagcccccagcaagtcccctgtgagaa

SEQ ID NO: 1303 - DNA, 540 bp, Homo sapiens
ggcacgagggaaaagactggcctgggagctgatagcaaggagcttggctgtgtgggactatgcaggagatgtttcaggctatttggaaggaagttggttcccgtaccggtctcaagtttaccttgcagtttcttttctcggacccacacacttctctctgacccaaggagtgggaaggctggcccctttgaaacctctttctgcaaacagataagcctgactgtgttttgttttgctttcagctgaaccaaacacatggaatctggaggttaaaagactgccaagaagtcaaggggagagagaaatgaggatggaaaaggaaactctgctgttctgtggcctttggggctttgacctcgtctggaagccattaacaattgttctaagcccatcgcctgaattctgaggttcagccgtctgccacacactctctgggtgaccttgaccacaatcatctactgtggattcccagtggcacctgtctggctcaagcccctgctctgcctacagagctgcatatacagctgcctctagaacatt

SEQ ID NO: 1304 - DNA, 531 bp, Homo sapiens; identical to SEQ ID NO: 820
  misc_feature 363: n = A,T,C or G

SEQ ID NO: 1305 - DNA, 1041 bp, Homo sapiens; identical to SEQ ID NO: 821
  misc_feature 531, 630, 863, 864, 865, 866, 867, 868, 869, 871, 872, 873,874, 875, 876, 877, 878, 880, 881, 882, 883, 885, 887, 889,890, 892, 893, 894, 895, 898, 900, 908, 909, 941, 959, 974: n = A,T,C or G

SEQ ID NO: 1306 - DNA, 540 bp, Homo sapiens
gcctgggaggatatgagagtctggctgagcttccagcaatcatgacccatgcctctgtgcctgagaaggacagagctaccctcgggatcaatgacacactgatacgactttctgtgggcctagaggatgaacaggaccttcttgaagacctggatcgagctttgaaggcagccacccttaaaagttcgagtcaaagctgtcattccagtgctgccatcaggagcagcatccaaggggccaaatcttcggaataactggacagatcattacggagcatacgcagaactgcactgaatattttaaggccctaatgagtttacagctgtaaccttccatggatcttcccttaagaactgtcttctgtttatcttctaactaacaggttgttctgttagtatcatttcggtaattttgctatatttgtgtccaaggaagtaagagttgttctgttttgggatcatgttgtcttttttctttcttcagtagcttatgatatattttaatcatgtttacaatgttacaatttagtattgatgtttt

SEQ ID NO: 1307 - DNA, 470 bp, Homo sapiens; identical to SEQ ID NO: 823

SEQ ID NO: 1308 - DNA, 479 bp, Homo sapiens
gctttataaatttacactaccttttgaatatacaaacctcattcttcattagacaacgtgaaggctttgggttttttgaagttaaatttgaaggtgcagtttgctttggcattccctcagctccagatgtattaactactgtgcttgcagaggccaggactaagattgtactatgaaacttactgagtagttttcataaattattattcaatggagagatttttagatttttgtattctgcttagtttaaaaaaacaaaacaacaaagagtagttaccatgaggggctggtacgttgatgctgttgttgccaaacaaacttaggcgaatccctaacatagcaggtgtggagaggatgacgcgtggctttgatgaatgttggaaaggagcttctgcagccttgactgtactgggtctgtgaaggcgcacacgtgcctttgtaaatgttcattctcggcctcatgaaccaggtgatgagtg

SEQ ID NO: 1309 - DNA, 486 bp, Homo sapiens; identical to SEQ ID NO: 824
  misc_feature 435: n = A,T,C or G

SEQ ID NO: 1310 - DNA, 420 bp, Homo sapiens
ctaccataaaacaattaagcactagccattaattcagttgtctgcagaaagagtctggaattctcactgagatagaaattcatattacagactacattccatgccaagagcaaattaatatactatactgataaatgaggatccttcagacaagataatttaacaaggcctagagaattttggggtcactacattattcttgaggcgtgtcaagagttaacaaccctggtgctattaacactaagtgtaaaactcttgcctggcagaaggtgctattctctagtgtaaacatttatctggtccctacaaattccctttgaagtcactccccttgcatctgtgctaatctctagtgttaaacatttatctggttccttttgaagtcactccttttgcacctggaaaaattcaatgtgcctt

SEQ ID NO: 1311 - DNA, 60 bp, Homo sapiens
attctgttatgatttgcaatttactctgtattataaaaagtctgaggctcgactggaaaa

SEQ ID NO: 1312 - DNA, 105 bp, Homo sapiens
tttattatttaagcctattactaaaactttataaaatgcatttggcgaatacaccagagaaaccagctcataaaatatgatcattaacgaactgcaaacctcatc

SEQ ID NO: 1313 - DNA, 368 bp, Homo sapiens
gctcgtcgctgccgtcgctggaaacctgatcccccgcagtcaactttgacaatggccaagaacaaattaaaagggcagaagtccaggaatgtatttcatatagctagccacaaaactttcaaggctaaaaacaaggcaaaaccagttactactaatcttaagaagataaacattatgaatcatgaaaaagtcaacagaatgaacagagcttttgtaaatatacagaaagaacttgcaaacttctcaaaaagcctttctcttaaatctgtgcagaaagagctgaagcaccatgaaaatgaaccagctaacgttgatgaagcgacacgactaatggctcagttgtaatacagagatagtgcatcacattc

SEQ ID NO: 1314 - DNA, 259 bp, Homo sapiens; identical to SEQ ID NO: 825

SEQ ID NO: 1315 - DNA, 339 bp, Homo sapiens
tctggaagtttgtaaacacgctctttctcagtagaggaggagcgcttttctccagaaagagaagaattcccctgctgcgtcttccctcttcttagagcctgtgctgtggacaagacagcattctctggccatcagcacaagcagaggcggctcaagttctaattctcaaagggcagaaatgctcgcaggcggcggctgtggaccaggcagaagctgggaagtcatcaattccaagccagatgaaagatccagactgagccagtgcattgcagaatcatggatgaatttcagcatgtttcttcaagaaatgtctctttttaaacagcagagtcctggcaa

SEQ ID NO: 1316 - DNA, 330 bp, Homo sapiens
cggcacgagggggcctctcagtttctctcttggggagaatcctggaggttctttgaggtctttcaagctctattagtttggcagctagacaaactgagggtttgtgtcagaaaagggggtagagaatagggaaacaatggcaacttttgctaaggtcaaaacaggtctcggtttatgttgcatccccggaccaagacagtggccttcatcagcatcttccctctcctgagaacagctgccagtccatgaatcctcagaacacaacctagagtatctcaggaaccaaggaagaatggtcactgagaccgtccccacaccctcggtcctttg

SEQ ID NO: 1317 - DNA, 318 bp, Homo sapiens; identical to SEQ ID NO: 826

SEQ ID NO: 1318 - DNA, 526 bp, Homo sapiens; identical to SEQ ID NO: 827

SEQ ID NO: 1319 - DNA, 437 bp, Homo sapiens; identical to SEQ ID NO: 828

SEQ ID NO: 1320 - DNA, 400 bp, Homo sapiens
ctgagaacccacaggctgaccaccaaattgttctggatgtattgcatctgaaactcttgcagaattgaaaattgtcaaaatcttgaagaatattttctttagaacaatctgtaatcctattcttcctgcttggtgaccaacttttatcttctgtttacttaaagcttttctaacatcaaagacaccagcccacagctgagagacattcttcagatgtcatcagagaaaaatggaagttccttaaccaacttctggctgctaagaaataggccagaccattctacacttttccactggatcctttccttattttttttggatcataattcgtttgcctgctggccattccattatatctgtagcattgtgacttctgatgtttcttaataaagcttatatc

SEQ ID NO: 1321 - DNA, 531 bp, Homo sapiens; identical to SEQ ID NO: 829
  misc_feature 437: n = A,T,C or G

SEQ ID NO: 1322 - DNA, 573 bp, Homo sapiens
gctcacgcagcaggatctggatacgacagactcctccagcttcaagacacttaaccaagaagaaggatggccagtgccttctcaaagttgctaactggccgaaatgcatctctgctgtttactacactgggaaccagtgccctgaccactggttacctgctgaataggcagaaggtatctgctgatgcccgggaacagcacaagctctttcccccaagtgcggactaccctgaccttcgaaaacataacaactgcatggctgagtgcctcacccccaccatctatgccaaactccgaaacaagatgacacccagtggctataccctggaccagtgcatccaaactggagtggacaaccccggccaccccttcattaagactgtgggcatggtggctggtgatgaggagtcgtatgaggtatttgctgacctttttgatcctgtcatcaaactaaggcacaatggctatgaccctagggtgatgaagcatctacggacctggatgcatcaagattctcacgggcagtttgatgagcgtatgtgttgtctctcgggtaccactggcgaacatccg

SEQ ID NO: 1323 - DNA, 462 bp, Homo sapiens
aaaacattcaaaagtcagaggtcattgagtttgtaactgtagatgcctttgcggatgtttccatcctgggagagacttccagcaccgtagtattgggttgtcaggagatgggccccaaattaactgccagagcaggcagaaagggatgctgcgttcagccattccacacttacttccagagctcttgtgttgtgtgtattgcaagcctggccagaactacttcaaaggcccctttacctaaaccattgtagaagccaggcctcccttggttgaagacatatttaatccccaaattcttccgtgatgggtgtttttcccagcaggagagggcactgatcagacagattttgttcctgcatcctgtacataatgttttgagtgtcaggtccagggatgagagaccgttgctcttcccattgtttctctcctggttttgtaaatgattctcaatcgacatatgag

SEQ ID NO: 1324 - DNA, 736 bp, Homo sapiens; identical to SEQ ID NO: 830
  misc_feature 565, 670, 671, 677: n = A,T,C or G

SEQ ID NO: 1325 - DNA, 430 bp, Homo sapiens
atttggtacagaattttgaatgacagtgaaaattgttgtctttgcaaagcacaaaactaacctggaaaggcgtttcggctcaggtagctacccagaatgtgtgtgattggtgtgtctccgctgtctgcagagaaagcagctgcccaaactactatttacattcccagatactgagagcaaatagcttttcatggccttgcatatttgggggcccttttctctgtcccgaccccaggtgcggatggaactagaaatgattcttctgtgagaaaagagtcctggacacggagtagtgtgtttcacaactgcggtggaacacaagtagattcccaagtcactgctgtgtgaggactgagtgaggttttgaaaaattctgtcttgagtccatgttatcttgatttttaaaattgatagggaagaaaccccacaa

SEQ ID NO: 1326 - DNA, 491 bp, Homo sapiens
ttcggatcaacggggagatggggtaagagttgagcagcgatcctaagttgagggaagatggggaaagagtggaagatccattgggtttttcaagtgccgcaaggacacaggctgataatagccttgtacaaaaatgtcagataagccagaattttagctagtaagctacgcaaatactaatacagtttcactatgctgtttgggatcatttaggagtggtggtgtgctttcttcattatacatttcaaatactgttcagtattaagcatctgtgaaattaacttctagtacaaacatgtagcttccataatctgtctttgttatcaatgtaagtggtgcagttagaaggaatcatctgaactcgtcggagcgaggaaaggatagctgagagaactgtggagtgctagggtgtaggcgagcagcagtggaccatgggtcggatgcagccagctctggcttcctgtgtggacagtgcctttcccaaggtgacc

SEQ ID NO: 1327 - DNA, 623 bp, Homo sapiens
gcaggcagcctaggcctgggactggaacagcgcggagatgggggcggcggccgcagagggaccgactctgttcgtgggtaaccaggagacgaaggtgacggaggagctcctcttcgagctgttccaccaggctgggccggtaataaaagtgaaaatcccgaaagataaagatggcaaactgaagcagtttgcattcgtgaacttcaaacatgaagtgtctgttccctatgccatgaatctgctcaacggaatcaaacttttcgggaggcctatcaaaattcagtttagatcaggaagcagtcacgcctctcaggatgccagtgtgtcatatccccagcatcatgttggaaatttaagcccaacctccacatctcctaacagctatgaaaggacagtgggtaacgtgtctccgacagcacagatggtccagaggtccttttcttctccagaagattatcaacggcaagcagtgatgaacagtgttttcagacagatgtcatatgctgggaaatttggttctccacatgcggatcagttgggattttcccatcagctcagcacatggcatactttagcagtcttcagctccagtggcgccaaatgcacgtcatcacagctaaaga

SEQ ID NO: 1328 - DNA, 529 bp, Homo sapiens; identical to SEQ ID NO: 831

SEQ ID NO: 1329 - DNA, 833 bp, Homo sapiens; identical to SEQ ID NO: 832

SEQ ID NO: 1330 - DNA, 464 bp, Homo sapiens; identical to SEQ ID NO: 833

SEQ ID NO: 1331 - DNA, 420 bp, Homo sapiens
cagtaggaaaagtattcagactacttgattatttcctagatgattccatgtttttattgcaacttgaaacttctgtttctgtatagaaatgcacagacttcatggcaataaggacgaaggtcaaaaaccacagaatagcttgtgaggggtgggggtgttgtgtgtgtgtgacagcaggtctccttgggcctgtgagagctggagacccagcaaagagagtgagttgatagtaacttggcttcattctgcgcacaggctgcagtgacctctagagcttctatcctacttgtctttgtatcaaaacttgaatttttcctcatcctgtcaggataaaagactcctctactcgggaagtgcctgcttttcatgtggtcctcagatctagtcagctctggctgcctcctcagatgtacatgacta

SEQ ID NO: 1332 - DNA, 352 bp, Homo sapiens; identical to SEQ ID NO: 834

SEQ ID NO: 1333 - DNA, 439 bp, Homo sapiens
gcaaagtctcctgagtgtgtagatctgggccttgagccactactagttcagtgcttggtgaggggtctgctcattttgggaaagtgtatcatgtggcagggcctctccgagtggcgggagactgcctacatgatttttttttttccctggggatgttagcagtttcacagcataaaagggaggacatgttctggggggctccagattgggaaccctcaggaagtaacttcctcaggaaggattcataaccaattgatcgatcaattgatcatgtgaactgcagcagctgtctgtccccttacttcagagtccccagcttcagagttttgttgcggacctgtgaggatttcagacacacacacacacacacacagaccagttttgtctatactacatcagcagttccagacaaaaagggaggctatctaggggcccgaaa

SEQ ID NO: 1334 - DNA, 426 bp, Homo sapiens; identical to SEQ ID NO: 835

SEQ ID NO: 1335 - DNA, 216 bp, Homo sapiens; identical to SEQ ID NO: 836

SEQ ID NO: 1336 - DNA, 538 bp, Homo sapiens
ctctctacagacacagacactgccacgtcagaagttcccccagatctagagaccggggctccctttcccactaagaactgttatgctgtcattgggctgtcgggcatctctgatctatctagaccggagggctctgtctgctcctgggtcgggggtgactccagatcacagcctctttctagggcttatgtggccaattgccagcaatagggcagactgcagctagcgctcctcacactacatctctctggcttcaagtctggaagcagccctcctctgccgggcatttcaccattcttactgatgacctggtacactgggacactaaagcagctcctaacttcagtcccccagggccagaacataacatttcagggacaacagttttcgtttcgctccgctgagtctgttacaaggaaggacagaaggttaggtggccggtttcacgttaccatgggtcatcaagagtcccggtgtttcaaattttcccaggagaggttctgtgattagagcgtagaaatctgttcccctttattga

SEQ ID NO: 1337 - DNA, 417 bp, Homo sapiens
gagatagtgatgctgatggtgacttaatacttcctaaatgacagtatcggcacagaagtatattccagttttatcagcacaacagtttaactgggtcagagattattcctagtaagaaatattagactgattggagttaaagtagcactctacatttaccatggtgtttggcagaattggtgttcaaggtcagtttattgaatgaatgaatgaatgattgaacaaatagatgcaaacattcagaactatatcataatggaatgtatggccagagacagaattacccttctgtttcttttacacaccaaagtatcctgattcccctgggagtagagagaaagatatgaaccaatagggagagtcaggccattctactggtattcatccaactgtcatttgaagggaggaggcatgaat

SEQ ID NO: 1338 - DNA, 382 bp, Homo sapiens
ctacattcaacaaacgcctcttgaatgctctatgattcccccagacacatgctgacagacacgagggaagcaagacagattctttctccactgttaaactctggggagtggtatcagcttttgaaaccctgctctagactcttacaaaatggctacacttagcacatactctgccctggctatatattatattgggccatagagatcagcaatgtatcaattaatagattaatccagagacaggaaggaggaaacgaaagctagagcctctttgtgactccaccaactccttcttgtctccttttattgaagagtccgcacacatactcacccctctggtgggccacagaggaggcgcctgcatcttgcagatgatgtagca

SEQ ID NO: 1339 - DNA, 360 bp, Homo sapiens
agagaactccaactcggactcagactctgactaaaggcctgtctgagcttaacaactagagccactcggccctctcacccacgctgtcctgacggggctcctggagcatggcaggaatgccatgggagaacagaccgaggagcccgtctctcaagattacactcccgaggcctcacattcaaaattggctgtgctggcttggcactgctgagctagcgtggtagggcacgttgacaagccttccttctcccctttctgtccttgagcccctttaacctcactgcccccaccgaagcacacatcaaacggagccaatcactacagccaatcatgtggcagcatgggggtggggtgggactt

SEQ ID NO: 1340 - DNA, 542 bp, Homo sapiens; identical to SEQ ID NO: 837

SEQ ID NO: 1341 - DNA, 465 bp, Homo sapiens
aaattatttcatgagttcagccgagccagagccaacatgaagacagccacagtcttgtttctggtggctttgatcactgtggggatgaacactacctatgtagtgtcttgccccaaagaatttgaaaaacctggagcttgtcccaagccttcaccagaaagtgttggaatttgtgttgatcaatgctcaggagatggatcctgccctggcaacatgaagtgctgtagcaatagctgtggtcatgtctgcaaaactcctgtcttttaaatggttgacagccatgtggaagatggattcaatcttcataaacatgaatgatggccagccccagaagatttcttctgaattcacagagcctgtgcttggctacttcctagccctagaattgcattcttggacaaggaagatctatattgtggtgacaatgccctaatatgtctgtgtctaaataaactaccttagcat

SEQ ID NO: 1342 - DNA, 381 bp, Homo sapiens
caaggatcagcctgagagaaccagagttaaggctcttagggtttctgagagctcggctggaagtgactgggtgacaaggcacacaggctcagctgtggcagctccatcatgattccacaggtagtgaccaatgagaccatcacaacgatttcaccaaatggaatcaactttccccaaaaagacgagtcccagcctacccaacagaggcaagacagcctgaagaaacatctaaaggctgagatcaaagtgatagtggcaatccagatcatgtgtgctgtgacagtgttggctctgggaatcattttggcatctgttcctcctgtcccatattttaactcagtgttttctgtcctgttaaaatctggctacccatttatagga

SEQ ID NO: 1343 - DNA, 313 bp, Homo sapiens
tcatgatgaagaaaagtaatatattattttggtacaaaaaagtttaaggagaaaactgaggtttctaatataaacagggctgtacagagacaagaggattaaaagcactggggcatggaggttctggttgtagaaagcacttgagtattcttcaggagtgagactggtggtgcccaacaagagcatctgtctcagagctccaatcttggtcaaccctctcttggggctggtatgatgtggctttaaacttgcactgcatggcctggagcagcaaagccagacaccacaatatcagattcacccaagaagaggt

SEQ ID NO: 1344 - DNA, 437 bp, Homo sapiens; identical to SEQ ID NO: 838

SEQ ID NO: 1345 - DNA, 537 bp, Homo sapiens; identical to SEQ ID NO: 839

SEQ ID NO: 1346 - DNA, 419 bp, Homo sapiens; identical to SEQ ID NO: 840

SEQ ID NO: 1347 - DNA, 495 bp, Homo sapiens; identical to SEQ ID NO: 841

SEQ ID NO: 1348 - DNA, 493 bp, Homo sapiens
gcaaaaggaagtttgtcttaataatgcagcttctgtgatgttaagtatttttgcctgttttacctcaatttgaacaaataggagaagtctgtgtgcatgctggacatgctcagtacacacgacagcccgccggtgcagtgcggtgtcagctgctcggtgttgggtgcgtgactcagtcacagtggaatccctaagcgttcctaaatcatgttgtcaaattctccagtctcgggagttctgggcccattacctgctgtgcataggactggtaccaaggactattgagtgtagacaaacgatcaactcttggctttgaccatggctttaaacaaaggggtgaaaacaagaaagaataggatggaatctggaataaaacagtgaaagagcattgttctttgtaccttgaatgtagaatttgtttttatttcataattctgctagcaaacatgactgttaaaatgatgtatttatatatgtaataatttagaaattc

SEQ ID NO: 1349 - DNA, 424 bp, Homo sapiens; identical to SEQ ID NO: 842
  misc_feature 184: n = A,T,C or G

SEQ ID NO: 1350 - DNA, 361 bp, Homo sapiens
atgggggggaaacgatgtccctctagtcctggtggtgtctgtgtgacctgttagcaaacattgtccagtgctgaaacggagtacctcagaagggtgcactgttctctgctgaagtcacggtagagtcaggacatgatggttcggaatgtctcgttggcagatgtgagcccaatagctctttggtgtagtgttttctctttaggcttacagagagttttcattttcatattcagttttttttaatgtcccatttcttttgcaatattattcacaagaaggtaatgactccaactgaacgcggaactcttgccggcgctccgggtgcatctgtgtttatccaagcagacacgtcatggatgct

SEQ ID NO: 1351 - DNA, 320 bp, Homo sapiens; identical to SEQ ID NO: 843

SEQ ID NO: 1352 - DNA, 432 bp, Homo sapiens; identical to SEQ ID NO: 844
  misc_feature 185, 186: n = A,T,C or G

SEQ ID NO: 1353 - DNA, 497 bp, Homo sapiens
agatagagcagggtatcagatgttttcctttgacctctgcacaccacacataggcagcccacacacatgtgtgcctatgacacacacaaataaaataaacaataataattttaaaaaatcactccagaatttctgctttgaactctctgataaccaagccgtggttgcacgggtccatccttgtgtggatcttagtggttcaatccaaacacacagaacaaataaggttgtctgacactagggagacctcccgaagctcttgccttcctaatgtgcacctttgagtgtgcctcatggaatcgagtcagttctttctcatatcctctttagcaagacccttcctggacactgctctttgtttttattttctccatggtacagtgtagataattatgcatctccttcttttatatattctcatatatactaaaatgtaagctcacaacagccctgtgttttcatttttcactaacatagtccagagaccagaacaatgc

SEQ ID NO: 1354 - DNA, 497 bp, Homo sapiens; identical to SEQ ID NO: 845
  misc_feature 324, 335: n = A,T,C or G

SEQ ID NO: 1355 - DNA, 545 bp, Homo sapiens
agaacaatcaacttttagagaagttaccttagcataagagcagatagatctgtggatttcacaaagttacccctggctctggttaaactgtgtgagctgtaaagtaagtgtagtcacagtgaagagtttgcttttgtctcgttttctagatgaatattggagatgcctagactataacaacttttcttttcaagcttccgtttgtgcagtttttattgtcatcttgatttgttagattttttttttttaaagaaacatcctgtaatagaaaaaaagtattttgttctgttctaaaggtcatttctctggtaaaagttactgtgattcttagattgcaaagaataatgctagttaaatgccaatgaactatttttactctttttctatgaaatgtatagatctctggggcagacggtggcaatggtatccctttttaccttataaacacttgaacacttgcatcagaaataatgctgacctgataatgctcccactatattttctcaaagtctgtttacttaaaattgtatgagatgacatgacta

SEQ ID NO: 1356 - DNA, 227 bp, Homo sapiens
tcggcacgcagggggagacagctggaggtggagagactgaggtccttggtagcctgagtgtgcccctgctcctcttcaggaagtgaagacaagccttggtgtgcaatcacaagtccttctggagttctcatccagacattctgaagatggagaggtctactcaggagctgtttatcaacttcacagttgtcctcatcaccgttctccttatgtggctcctcgtgaag

SEQ ID NO: 1357 - DNA, 437 bp, Homo sapiens
agcagccagtgtctacagttaaagattgccaagtgtatttcaatatggttgtaaagatcacattcagatatggtttgcacaggaggcagacagctctaatgtggatagatgataacttttactgctctgcagtaagttttataggctacattttcctaatttcatatttaattgtatttttactacaaaaaacattggagtacaaatcatatgaaatgaaaaaggtgccttcatggaaaaatattttttttgtatgtgtgtgatataaaaataatgttgagtaaatttctgagtaagagttgtataccctttgtctaaatatgcttgtctgttcacggaaaggacagaactggaaattttaagaaaggaaaaaaagtacactgaagtactttggataacttgagttaatgaaaagttctaactggtttggtgctgcc

SEQ ID NO: 1358 - DNA, 460 bp, Homo sapiens
ctgcaacttctgcacacacccaaaatgacataacagaagtcaagagtgctaacattggtggcctggatctgcaaaccacagttgggttggcaacggctgctgctgtgttcctggttggggttttgggattgatagtgttcctctggtggaagagaagaaggcaaggccagaagactaaagctgaaatcccagccagggagccattggaaaccagtgagaaacatgagagtgttggccatgaaggacaatgtatggatcccaaagaaaaccccaaggataataacatcgtgtatgcttccatctccctctcaagcccgacctcaccaggaacagcgcccaacctgcctgtccatgggaaccccccaagaagagactgtgtactccatcgtaaaggccaaataagttggtctggatgacactcttagagtcacctttgtttctagtaggaagactctcagct

SEQ ID NO: 1359 - DNA, 477 bp, Homo sapiens; identical to SEQ ID NO: 846

SEQ ID NO: 1360 - DNA, 445 bp, Homo sapiens
gtctttttcttcccagacactattctgacttacgtctccattacaaacattttattgaactacataaaaatgtgtgaaccacaaaaaaaaaatgtatttgtcaaaattgtagttgtctttctgaggctgacctgagttctctgataccattctctccagttgtatccagtttcctgtaaacaatgtgactttgtttttctcagtagctaaaacatcccaattatgtgagtgtacactttctttactcattcctctgtgggccaccagctgggttggttccatatctgagctattgtgcatggaattgtctctgtggtgggtgtagtaaactcccaggaatgcctgtacatgtttgtagaggccagaagaaggcacaaaatcttgagccaggcttacatgcacttgtgagtagccccacataggtgctaagaacccagttcaggtc

SEQ ID NO: 1361 - DNA, 422 bp, Homo sapiens; identical to SEQ ID NO: 849

SEQ ID NO: 1362 - DNA, 272 bp, Homo sapiens; identical to SEQ ID NO: 850

SEQ ID NO: 1363 - DNA, 410 bp, Homo sapiens; identical to SEQ ID NO: 851

SEQ ID NO: 1364 - DNA, 440 bp, Homo sapiens; identical to SEQ ID NO: 852

SEQ ID NO: 1365 - DNA, 211 bp, Homo sapiens; identical to SEQ ID NO: 853

SEQ ID NO: 1366 - DNA, 615 bp, Homo sapiens; identical to SEQ ID NO: 854
  misc_feature 403: n = A,T,C or G

SEQ ID NO: 1367 - DNA, 251 bp, Homo sapiens
aagctgtggtgcccacagagagtcactctggtgcttgtgtccccaccccacccctgaagtgaagaaaacgaccgtgaggcacccgggagcagccaggattgatgaacgccaccaacacgcatcccccaaagttccctgaagaacaagttctactcttgccaaagaaatgcctggcctggagagctctcctggaagccaggatgccatcgtgagccagggactgctgtgcatgcctctgcatgagaagaagc

SEQ ID NO: 1368 - DNA, 411 bp, Homo sapiens; identical to SEQ ID NO: 855

SEQ ID NO: 1369 - DNA, 1123 bp, Homo sapiens
  misc_feature 441, 516, 531, 533, 613, 684, 751, 812, 813, 827, 828, 864,886, 887, 888, 889, 890, 891, 892, 893, 894, 895, 896, 897,898, 899, 900, 901, 902, 903, 904, 905, 906, 907, 908, 909,910, 911, 912, 913, 914, 915, 916, 917, 918, 919, 920: n = A,T,C or G
  misc_feature 921, 922, 923, 924, 925, 926, 927, 930, 931, 933, 935, 936,937, 938, 939, 940, 941, 942, 943, 944, 945, 946, 947, 948,949, 950, 951, 952, 953, 954, 955, 956, 957, 958, 959, 960,961, 962, 963, 964, 965, 966, 967, 968, 969, 970, 972: n = A,T,C or G
  misc_feature 973, 974, 975, 976, 977, 979, 980, 981, 983, 984, 985, 986,987, 988, 989, 990, 991, 992, 993, 994, 995, 996, 997, 998,999, 1000, 1001, 1002, 1003, 1005, 1006, 1007, 1008, 1009,1010, 1011, 1013, 1014, 1015, 1039, 1040, 1047, 1053: n = A,T,C or G
ctggccctcctggtcctcctggcccacctggcctgtgtgacccctcccagtgtgcgtactttgccagccttgctgcccggccaagtaatgtgaagggcccatagaagattctagatcatcaaaacactactatggatttctgaaacttgaactcggagcccattgggaagccagaagccttgaaacatttcaaatccttcttctctctccccttcctacttcccgccttttcttcctgcttcccctctttctagtcttttctccttgcctgccttaattgtcttttcccgtcctcagagacctcacagttattaaaaccaacagatactgtcagacagtcaggttattattaatattattgttattgtttgctgttatttcaaaggctaatagttttgagggagctcctggtggacaggaagcagtttcctggctcagctnccctgtcatcactggctgaagtgtgacagccaattcttgaggaacctcggtgctatgaaccgtgaccatgtatgnacttgttgatgtacncnttcctggaaagaacgttaaggaggacatgaatgtgtgttccctagtgtccaaagatggccaggaaagtagttgaatcacntctcaagagatgacgagagagattgacgtaaagatatgcccggagaaagcactgggtaaacgctagattgngagtgctctggctagccaaaccaaaggcatttggaattgtgcgctaaaagtgaacccagggggttgngcagctctccacttggtagggaattgtggagagttaggtggtgcggtaattgacgtgatgnntgggcaccttgacnngatctcgctacggggggggccccccttctataaagnatgcgcttcagcagtacgaagnnnnnnnnnnnnnnnnnnnnnnnnnnnnnnnnnnnnnnnnnnggnngngnnnnnnnnnnnnnnnnnnnnnnnnnnnnnnnnnnnngnnnnnngnnngnnnnnnnnnnnnnnnnnnnnngnnnnnnngnnngggggggggggggggggggggggnnggggggngggggngggggggggggggggggggggggggggggggggggggggggggggggggggggggggggggggggggggt

SEQ ID NO: 1370 - DNA, 960 bp, Homo sapiens
  misc_feature 538, 568, 574, 619, 830, 903, 928, 929, 930, 931: n = A,T,C or G
ctcagacctcgtcagtgacccatctgcccattgagaacttgaagccaaacacaaggtattacttcaaagttcaagccaaaaaccctcatggctatgggcctgtcagtccttcagtctcatttgttacagaatcagacaatcctctgctggttgtgaggccaccaggtggtgagcccatctggatcccattcgctttcaagcatgatcctggctacactgattgccatggtcggcagtatgtgaaacgaacatggtacaaaaagtttgtgggagtcgttctttgtaattctctaaggtataagatctacctcagtgacaatctcaaagacacattctacagcattggagacagctggggaagaggtgaagacactgtcagtttgtggattcgcactggatggaagaacagggcctcaatcttatatagaagccctcccaacattcaaggctactatcgccagttaccgccagagcctgtcactttggcacattggttttggaccccctattactatgtgggttggtacgatgtggagcntcgacccgaggaagttgtacacacagatgngcctgntgaagtctacctccacgtgtgtactacatcggctaggatttgcanagaagacatgtgacccggtccgagttgctagagcacagtgcctgcattggctctcacagatttgccatcttgcttataaatcaatagtttcgacctatcgcttcgttcagtgtttataacttgagaagacccgacggggggtcgttgggtcttgcctagagaaaaaagggtgttgttggcaagaggtgagctgagctatctacttctgtcnctggagctggacacctgctacctggcgttttctttttgccccggtggaacacgcgtggttgtacgccccctgncgagagtggcgccccctgactagannnngaggggatgatcttgtttgttatgtttat

SEQ ID NO: 1371 - DNA, 498 bp, Homo sapiens; identical to SEQ ID NO: 857
  misc_feature 231: n = A,T,C or G

SEQ ID NO: 1372 - DNA, 377 bp, Homo sapiens; identical to SEQ ID NO: 858

SEQ ID NO: 1373 - DNA, 506 bp, Homo sapiens; identical to SEQ ID NO: 859

SEQ ID NO: 1374 - DNA, 605 bp, Homo sapiens; identical to SEQ ID NO: 860

SEQ ID NO: 1375 - DNA, 691 bp, Homo sapiens; identical to SEQ ID NO: 861

SEQ ID NO: 1376 - DNA, 234 bp, Homo sapiens; identical to SEQ ID NO: 862

SEQ ID NO: 1377 - DNA, 456 bp, Homo sapiens; identical to SEQ ID NO: 293

SEQ ID NO: 1378 - DNA, 246 bp, Homo sapiens; identical to SEQ ID NO: 294

SEQ ID NO: 1379 - DNA, 404 bp, Homo sapiens; identical to SEQ ID NO: 295

SEQ ID NO: 1380 - DNA, 563 bp, Homo sapiens; identical to SEQ ID NO: 863

SEQ ID NO: 1381 - DNA, 210 bp, Homo sapiens; identical to SEQ ID NO: 297

SEQ ID NO: 1382 - DNA, 554 bp, Homo sapiens; identical to SEQ ID NO: 864

SEQ ID NO: 1383 - DNA, 499 bp, Homo sapiens; identical to SEQ ID NO: 299

SEQ ID NO: 1384 - DNA, 438 bp, Homo sapiens; identical to SEQ ID NO: 865

SEQ ID NO: 1385 - DNA, 611 bp, Homo sapiens; identical to SEQ ID NO: 866
  misc_feature 532, 541: n = A,T,C or G

SEQ ID NO: 1386 - DNA, 441 bp, Homo sapiens; identical to SEQ ID NO: 867

SEQ ID NO: 1387 - DNA, 421 bp, Homo sapiens; identical to SEQ ID NO: 868

SEQ ID NO: 1388 - DNA, 448 bp, Homo sapiens; identical to SEQ ID NO: 869

SEQ ID NO: 1389 - DNA, 512 bp, Homo sapiens; identical to SEQ ID NO: 305

SEQ ID NO: 1390 - DNA, 511 bp, Homo sapiens; identical to SEQ ID NO: 870

SEQ ID NO: 1391 - DNA, 531 bp, Homo sapiens; identical to SEQ ID NO: 871
  misc_feature 153, 447, 448: n = A,T,C or G

SEQ ID NO: 1392 - DNA, 453 bp, Homo sapiens; identical to SEQ ID NO: 308

SEQ ID NO: 1393 - DNA, 477 bp, Homo sapiens; identical to SEQ ID NO: 872
  misc_feature 455: n = A,T,C or G

SEQ ID NO: 1394 - DNA, 398 bp, Homo sapiens; identical to SEQ ID NO: 873

SEQ ID NO: 1395 - DNA, 441 bp, Homo sapiens; identical to SEQ ID NO: 874

SEQ ID NO: 1396 - DNA, 464 bp, Homo sapiens; identical to SEQ ID NO: 875

SEQ ID NO: 1397 - DNA, 509 bp, Homo sapiens; identical to SEQ ID NO: 313

SEQ ID NO: 1398 - DNA, 445 bp, Homo sapiens; identical to SEQ ID NO: 876

SEQ ID NO: 1399 - DNA, 403 bp, Homo sapiens; identical to SEQ ID NO: 315

SEQ ID NO: 1400 - DNA, 410 bp, Homo sapiens
gcaaatcatcatcttcagtgaggccctgggaggaggaggccgaggtggcgcgcagctgattacgtgtacaagaacagcatcaaggtgagctgcctagggctggatggggaatctccaaggcaacccttgccggtttgcgctgacctctagagggccagaaggtgggatccagcgctacgttctgcaggcttcagaccctgctgtcagtcaagcctggataaagcaagtggcccagatcctggaaagccagcgtgactttctcaacgcattacagtcacccattgaataccagagacgtgagagccagaccaatagcctggggcgaccaggagggccttgggtagggagcctgggagaatgcggcctggagacctggcccaggcagcatgcacacacccatcaatggctct

SEQ ID NO: 1401 - DNA, 428 bp, Homo sapiens; identical to SEQ ID NO: 878

SEQ ID NO: 1402 - DNA, 378 bp, Homo sapiens; identical to SEQ ID NO: 318

SEQ ID NO: 1403 - DNA, 312 bp, Homo sapiens; identical to SEQ ID NO: 319

SEQ ID NO: 1404 - DNA, 258 bp, Homo sapiens; identical to SEQ ID NO: 320

SEQ ID NO: 1405 - DNA, 396 bp, Homo sapiens; identical to SEQ ID NO: 879

SEQ ID NO: 1406 - DNA, 226 bp, Homo sapiens; identical to SEQ ID NO: 880

SEQ ID NO: 1407 - DNA, 426 bp, Homo sapiens; identical to SEQ ID NO: 881

SEQ ID NO: 1408 - DNA, 501 bp, Homo sapiens; identical to SEQ ID NO: 882

SEQ ID NO: 1409 - DNA, 513 bp, Homo sapiens; identical to SEQ ID NO: 883

SEQ ID NO: 1410 - DNA, 453 bp, Homo sapiens; identical to SEQ ID NO: 884

SEQ ID NO: 1411 - DNA, 365 bp, Homo sapiens; identical to SEQ ID NO: 327

SEQ ID NO: 1412 - DNA, 428 bp, Homo sapiens; identical to SEQ ID NO: 328

SEQ ID NO: 1413 - DNA, 461 bp, Homo sapiens; identical to SEQ ID NO: 329

SEQ ID NO: 1414 - DNA, 503 bp, Homo sapiens; identical to SEQ ID NO: 885

SEQ ID NO: 1415 - DNA, 520 bp, Homo sapiens; identical to SEQ ID NO: 886

SEQ ID NO: 1416 - DNA, 469 bp, Homo sapiens; identical to SEQ ID NO: 332

SEQ ID NO: 1417 - DNA, 540 bp, Homo sapiens; identical to SEQ ID NO: 333

SEQ ID NO: 1418 - DNA, 422 bp, Homo sapiens; identical to SEQ ID NO: 334

SEQ ID NO: 1419 - DNA, 545 bp, Homo sapiens; identical to SEQ ID NO: 887

SEQ ID NO: 1420 - DNA, 526 bp, Homo sapiens; identical to SEQ ID NO: 888

SEQ ID NO: 1421 - DNA, 562 bp, Homo sapiens; identical to SEQ ID NO: 337

SEQ ID NO: 1422 - DNA, 432 bp, Homo sapiens; identical to SEQ ID NO: 338

SEQ ID NO: 1423 - DNA, 300 bp, Homo sapiens
ctgaagtgggcacgggagtcacaggacactgtgtgagtgctgggaactgagcttgtgttctctgaaaccactgaattctatctccagctcttattttatttttgacagaggagactgttacatttaactgaagctgcctttaaagttctgatctacttcagtggtctgaatgctggaattacacatatacacagccatcgctatccagaaataaaaacctgttttggttggggtttgtttgtttttttgagacaggttctctatacaaagtcctaactgttcaggaacagttatacatct

SEQ ID NO: 1424 - DNA, 406 bp, Homo sapiens; identical to SEQ ID NO: 340

SEQ ID NO: 1425 - DNA, 480 bp, Homo sapiens
  misc_feature 105: n = A,T,C or G
tccaggggactgtacctatttcctgagctggctgaagcttccggacatgcctcctgccccttactaactggctcagctgactcgggacagcctggcctctgccangagaggacactgggccatcactctgtgaacacttgtgtgcccggctggcttctaacacccaccgccattggaatttgagctgtcagctctgggcgccagattggctctgatgctaatttatatgacacaacatctctgtggtttatgttttatttttctttcttactgtcattgttagtgttgtcaagagttttccccctccccgtaacgtttttgtcattatgtctttgacgctttaaatttcagagaagagtatattgcctaatgggaccaacataaagtagttatcaacaactttattcagctctactaaaaaacaaaaggaactaaattattgaaaaggtttaagaggtcattatttccgtgttaaaatct

SEQ ID NO: 1426 - DNA, 589 bp, Homo sapiens; identical to SEQ ID NO: 890

SEQ ID NO: 1427 - DNA, 490 bp, Homo sapiens; identical to SEQ ID NO: 891

SEQ ID NO: 1428 - DNA, 533 bp, Homo sapiens; identical to SEQ ID NO: 344

SEQ ID NO: 1429 - DNA, 431 bp, Homo sapiens; identical to SEQ ID NO: 892

SEQ ID NO: 1430 - DNA, 313 bp, Homo sapiens; identical to SEQ ID NO: 893

SEQ ID NO: 1431 - DNA, 474 bp, Homo sapiens
aattcggatccatggggggtctcaccgggcgctgtctccttgacagatttcggtcgaaatgtcctacaccccgggccagcctgtcaccgccgtagtgcaaagagttgaaattcataagttgcgtcaaggtgagaacttaatcttgggcttcagtattggaggtgggatcgaccaggacccgtctcagaatcccttctcggaagataaaacagacaagggcatttacgtcacacgagtatcagagggaggtcctgctgaaattgctgggctgcagattggagacaagatcatgcaggtgaatggctgggacatgaccatggtcactcacgaccaggctcggaagcggctcaccaagcgctcggaggaggtggtccgcctgctggtgactcggcagtctctacaaaaggctgtacagcagtccatgctgtcttagcagtcagccaccgtctagacttgggcccactgacctttttg

SEQ ID NO: 1432 - DNA, 466 bp, Homo sapiens; identical to SEQ ID NO: 348

SEQ ID NO: 1433 - DNA, 493 bp, Homo sapiens; identical to SEQ ID NO: 349

SEQ ID NO: 1434 - DNA, 605 bp, Homo sapiens; identical to SEQ ID NO: 895

SEQ ID NO: 1435 - DNA, 383 bp, Homo sapiens; identical to SEQ ID NO: 896

SEQ ID NO: 1436 - DNA, 380 bp, Homo sapiens; identical to SEQ ID NO: 352

SEQ ID NO: 1437 - DNA, 356 bp, Homo sapiens; identical to SEQ ID NO: 897

SEQ ID NO: 1438 - DNA, 565 bp, Homo sapiens; identical to SEQ ID NO: 898

SEQ ID NO: 1439 - DNA, 375 bp, Homo sapiens; identical to SEQ ID NO: 355

SEQ ID NO: 1440 - DNA, 444 bp, Homo sapiens; identical to SEQ ID NO: 899

SEQ ID NO: 1441 - DNA, 449 bp, Homo sapiens; identical to SEQ ID NO: 900

SEQ ID NO: 1442 - DNA, 440 bp, Homo sapiens; identical to SEQ ID NO: 358

SEQ ID NO: 1443 - DNA, 449 bp, Homo sapiens; identical to SEQ ID NO: 900

SEQ ID NO: 1444 - DNA, 220 bp, Homo sapiens; identical to SEQ ID NO: 901

SEQ ID NO: 1445 - DNA, 382 bp, Homo sapiens; identical to SEQ ID NO: 361

SEQ ID NO: 1446 - DNA, 456 bp, Homo sapiens; identical to SEQ ID NO: 362

1. A method for the diagnosis and analysis of autoimmune disease or arthritides, in a patient, comprising:
obtaining a patient sample containing mRNA;
analyzing gene expression using the mRNA that results in a gene expression signature of that mRNA, wherein said gene expression signature comprises the identification and quantitation of gene expression from genes that have been identified as being differentially expressed in RA; and
using that gene expression signature to diagnose or analyze the autoimmune disease or arthritide in said patient, wherein said gene expression of at least about 60% of said genes correlates with that of said gene signature.

2. The method of claim 1 wherein said autoimmune disease or arthritides are selected from the group consisting of: Rheumatoid Arthritis, Lupus, Ankylosing Spondylitis, fibrositis, fibromyalgia, osteoarthritis, Gout, Juvenile Rheumatoid Arthritis, and an autoimmune disease caused by an infectious agent.

3. The method of claim 1 wherein said autoimmune disease or arthritide is rheumatoid arthritis.

4. The method of claim 1 wherein said patient is selected from the group consisting of: a human, a primate, a dog, a cat, a horse, and a sheep.

5. The method of claim 1, wherein said analysis is selected from the group consisting of: an analysis of severity of the disease, an analysis of pain manifestation, an analysis of deformity, an analysis of treatment methods, and an analysis of treatment efficacy.

6. The method of claim 1 wherein said gene expression analysis involves at least about 10 genes that are identified as differentially expressed in arthritis.

7. The method of claim 1 wherein said gene expression analysis involves at least about 50 genes that are identified as differentially expressed in arthritis.

8. The method of claim 1 wherein said gene expression analysis involves at least about 100 genes that are identified as differentially expressed in arthritis.

9. The method of claim 1, wherein said genes identified are expressed at least about 1.5 fold higher or lower than normal.

10. The method of claim 1, wherein said genes identified are expressed at least about 2 fold higher or lower than normal.

11. The method of claim 1, wherein said genes identified are expressed at least about 3 fold higher or lower than normal.

12. The method of claim 1, wherein said genes are selected from the group consisting of the 385 genes or ESTs in Table 1 (SEQ ID NOS: 1-385), homologs, or variant thereof.

13. The method of claim 1, wherein said genes are selected from the group consisting of:
the genes in cluster A.

14. The method of claim 13, wherein the genes in cluster A are down-regulated (SEQ ID NOS:1-37) at least about 2 fold.

15. The method of claim 1, wherein said genes are selected from the group consisting of: the genes in cluster B.

16. The method of claim 15, wherein the genes in cluster B are up-regulated (SEQ ID NOS:1-37) at least about 2 fold only in late or severe disease.

17. The method of claim 1, wherein said genes are selected from the group consisting of:
the genes in cluster C.

18. The method of claim 17, wherein the genes in cluster C are up-regulated (SEQ ID NOS:1-37) at least about 2 fold only in early or mild disease.

19. The method of claim 1, wherein said genes are selected from the group consisting of:
the genes in cluster D.

20. The method of claim 19, wherein the genes in cluster D are up-regulated (SEQ ID NOS:1-37) at least about 2 fold in early or mild disease and more in late or severe disease.

21. The method of claim 1, wherein said genes are selected from the group consisting of:
the genes in cluster E.

22. The method of claim 21, wherein the genes in cluster E are up-regulated (SEQ ID NOS:1-37) at least about 2 fold in both early or mile and late or severe disease.

23. The method of claim 1 wherein said differentially expressed genes are the 385 genes identified as SEQ ID NOS:1-385.

24. The method of claim 1 wherein if the genes in clusters B or D are upregulated, the disease is diagnosed as severe.

25. The method of claim 1 wherein if the genes in cluster A are upregulated, the disease is diagnosed as moderate to low-grade.

26. The method of claim 1, wherein said gene expression of at least about 70% of said genes correlates with that of said gene signature.

27. The method of claim 1, wherein said gene expression of at least about 80% of said genes correlates with that of said gene signature.

28. The method of claim 1, wherein said gene expression of at least about 90% of said genes correlates with that of said gene signature.

29. The method of claim 1, wherein said gene expression of at least about 95% of said genes correlates with that of said gene signature.

30. A method for the treatment of RA comprising:
down-regulating at least one of the genes identified in clusters B through D.

31. The method of claim 30 wherein said down-regulation is by adding antisense oligonucleotides specific for the gene that is being down-regulated.

32. The method of claim 30 wherein said down-regulation is by adding or expressing an repressor of the gene that is being down-regulated.

33. A method for the treatment of RA comprising:
up-regulating at least one of the genes in cluster A.

34. The method of claim 33 wherein said up-regulation is by adding or expressing a transcriptional activator of the gene that is being up-regulated.

35. The method of claim 33 wherein said up-regulation is by adding a vector that expresses the protein encoded by the gene that is being up-regulated.

36. A method for the identification of genes for targeting in the treatment of rheumatoid arthritis in a mammal other than a mouse, comprising:
identifying homologs of SEQ ID NOS:1-385.

37. A method for the diagnosis of rheumatoid arthritis in a mammal, comprising
obtaining a tissue or fluid sample from a diseased patient;
isolating mRNA from said sample;
using the isolated mRNA to analyze the gene expression of at least about 40 genes, selected from the group consisting of SEQ ID NOS:1-385 or a homolog thereof, obtaining a fingerprint of the patient's gene expression;
identifying whether at least about 60% of said fingerprint is at least about 2 fold differentially expressed from that of a normal patient.

38. An array or a genechip, specific for rheumatoid arthritis, comprising at least 10 of the genes selected from the group consisting of SEQ ID NOS:1-385 or homologs thereof.

39. The array or genechip of claim 38, comprising at least 40 of the genes selected from the group consisting of SEQ ID NOS:1-385 or homologs thereof.

40. The array or genechip of claim 38, comprising at least 50 of the genes selected from the group consisting of SEQ ID NOS:1 -385 or homologs thereof.

41. The array or genechip of claim 38, comprising at least 75 of the genes selected from the group consisting of SEQ ID NOS:1-385 or homologs thereof.

42. The array or genechip of claim 38, comprising at least 100 of the genes selected from the group consisting of SEQ ID NOS:1-385 or homologs thereof.

43. An array or a genechip, specific for rheumatoid arthritis consisting essentially of, at least 10 of the genes selected from the group consisting of SEQ ID NOS:1-385 or homologs thereof.

44. The array or genechip of claim 43, consisting essentially of at least 40 of the genes selected from the group consisting of SEQ ID NOS: 1-385.

45. The array or genechip of claim 43, consisting essentially of SEQ ID NOS:1-385.

46. The array or genechip of claim 38, wherein said genes allow for the identification of the severity of the disease.

47. The array or genechip of claim 38, wherein said genes allow for the prognosis of the disease.

48. The array or genechip of claim 38, wherein said genes allow for the diagnosis of the disease.

49. The array or genechip of claim 38, wherein said genes allow for the identification of the most efficacious treatment of the disease in a specific patient.

50. A method for the diagnosis or analyses of autoimmune disease or rheumatoid arthritis, comprising
obtaining mRNA from a patient;
using the mRNA as a probe for the analysis of the array or genechip of claim 38;
comparing the results obtained with those of a normal patient.

51. A method of screening the efficacy of a candidate drug in vitro for the treatment of collagen-induced arthritis comprising:
identifying vascular endothelial cells expressing FARP mRNA and protein;
introducing a candidate drug to said endothelial cells; and
evaluating whether said candidate drug causes enhanced or normalized apoptosis of vascular endothelial cells.

52. A method of reducing the symptoms associated with collagen-induced arthritis comprising:
identifying a subject suffering from collagen-induced arthritis; and
administering a compound effective to deplete at least one of the group of FARP mRNA, FARP protein, FARP receptor binding, and FARP activity.

53. The method of claim 52, wherein said compound is an anti-FARP antibody.

54. The methof of claim 53, wherein said antibody interferes with binding of FARP to a FARP receptor.
